(19) United States
(12) Patent Application Publication
(10) Pub. No.: US 2025/0099614 A1
(43) Pub. Date: Mar. 27, 2025

(54) NUCLEIC ACID ENCODED TRANSCRIPTION FACTOR INHIBITORS

(71) Applicants: CureVac SE, Tübingen (DE); The Schepens Eye Research Institute, Inc., Boston, MA (US)

(72) Inventors: Joanna REJMAN, Tübingen (DE); Tim SONNTAG, Tübingen (DE); Markus CONZELMANN, Tübingen (DE); Joseph ARBOLEDA-VELASQUEZ, Newton, MA (US); Leo A. KIM, Brookline, MA (US)

(73) Assignees: CureVac SE, Tübingen (DE); The Schepens Eye Research Institute, Inc., Boston, MA (US)

(21) Appl. No.: 18/833,889

(22) PCT Filed: Jan. 27, 2023
(86) PCT No.: PCT/EP2023/052056

§ 371 Date: Jul. 27, 2024

Related U.S. Application Data
(60) Provisional application No. 63/304,188, filed on Jan. 28, 2022.

(51) Int. Cl. A61K 48/00; A61K 9/127; A61P 27/02; C07K 14/47

(52) U.S. Cl. CPC A61K 48/005; A61K 9/1275; A61P 27/02; C07K 14/4703

(57) ABSTRACT

The present invention is inter alia directed to artificial nucleic acid constructs, preferably RNA, comprising at least one coding sequence encoding at least one transcription factor inhibitor for reducing or inhibiting the activity of a target transcription factor in a cell. A preferred transcription factor inhibitor according to the invention is a Runt-related transcription factor (RUNX) inhibitor, for example a RUNX trap comprising at least one amino acid sequence for binding a RUNX transcription factor and at least one amino acid sequence for capturing or trapping RUNX. Further provided are pharmaceutical compositions comprising the artificial nucleic acid, preferably formulated in polyethylene glycol/peptide polymers, polymeric carriers, or lipid-based carriers. Also provided are methods of treating or preventing disorders, diseases, or conditions, and medical uses.

[0001] Transcription factor malfunctions play a crucial role in the development and progression of various different diseases. For example, increased RUNX1 function is a hallmark of pathological epithelial to mesenchymal transition (EMT), aberrant angiogenesis, degeneration, and fibrosis; processes underlying multiple prevalent conditions in the eye and elsewhere. Accordingly, transcription factors represent powerful therapeutic targets for treating or preventing numerous diseases.

[0002] However, developing effective medical treatments for transcription factor pathologies, for example pathologies relating to transcription factor overexpression, remains to be a challenge. For example, WO2019099560, WO2018093797, WO2019099595, and WO2021216378 describe small molecule inhibitors of RUNX1, inhibitory nucleic acids (e.g. siRNA), and also suggest the use of protein-based inhibitors (e.g., CBFB-MYH11). However, using protein-based inhibitors for transcription inhibiting factors is hampered by the fact that transcription factors are intracellular protein, thus making delivery of these into the cell challenging.

[0003] Nucleic acid-based sequences, for example RNA, may represent a promising class of molecules to provide the information for expressing intracellular proteins such as transcription factor inhibitors. So far, the use of RNA technologies for clinical applications has mainly focused on immunotherapeutics for multiple clinical applications. Pathologies caused by increased function or activity of a gene (e.g. a transcription factor) are more difficult to address directly with RNA-based therapeutics (Sahin et al 2014; Nature Reviews Drug Discovery. 2014; 13 (10): 759-80).

[0004] Thus, the underlying object of the invention is to provide nucleic acid-based therapeutics for producing transcription factor inhibitors suitable for reducing or inhibiting the activity of a target transcription factor in a cell or a subject.

[0005] The objects mentioned above are solved by the underlying description and the accompanying claims.

### Short Description of the Invention

[0006] The present invention is inter alia directed to artificial nucleic acid constructs, preferably RNA, comprising at least one coding sequence encoding at least one transcription factor inhibitor for reducing or inhibiting the activity of a target transcription factor in a cell. A preferred transcription factor inhibitor according to the invention is a Runt-related transcription factor (RUNX) inhibitor, for example a RUNX trap comprising at least one amino acid sequence for binding a RUNX transcription factor and at least one amino acid sequence for capturing or trapping RUNX. Further provided are pharmaceutical compositions comprising the artificial nucleic acid, preferably formulated in polyethylene glycol/peptide polymers, polymeric carriers, or lipid-based carriers. Also provided are methods of treating or preventing disorders, diseases, or conditions, and medical uses.

[0007] As shown in the Example section, the invention is inter alia based on the surprising finding that artificial nucleic acid molecules, e.g. RNA molecules, that encode transcription factor inhibitors can be used as specific inhibitors of cellular transcription factors, in particular transcription factors that have a pathologic transcription factor activity, e.g. transcription factors that are overexpressed or overactive in a disease, disorder, or condition.

[0008] As exemplified for a Runt-related transcription factor (RUNX), a transient, localized expression of RUNX transcription factor inhibitors using artificial nucleic acid constructs led to a reduction or inhibition of the activity of the RUNX target transcription factor (RUNX1) (see Examples). The inventors generated an effective dominant negative inhibitor for RUNX (also herein referred to as RUNX-Trap), by transiently expressing a fusion protein comprising a fragment of Core Factor Binding β (CBFbeta, CBFβ, CBFB) and Smooth Muscle Myosin Heavy Chain (SMMHC, MYH11) using an artificial nucleic acid construct, in particular an RNA construct. Without wishing to be bound to theory, the protein fusion of CBFbeta-SMMHC inhibited RUNX1 transcription factor activity inter alia by preventing its nuclear translocation and by reducing the interaction with the cellular transcription co-factor CBFbeta (see FIG. 1). Surprisingly, after administration of the artificial nucleic acid, the produced RUNX inhibitor sequestered RUNX1 from the cell nucleus and strongly reduced proliferation in primary human cell cultures derived from surgically excised membranes from eyes of patients with proliferative vitreoretinopathy (PVR). PVR is a blinding, relatively common complication of retinal detachment often associated with eye trauma driven by RUNX1-mediated epithelial-mesenchymal transition (EMT) that currently lacks medical treatment. PVR is characterized by the development of membranous intraocular scar tissue (membranes that consist of proliferating cells and extracellular matrix) and is the most common cause of failure after retinal detachment surgery. In addition, it has been shown that alternative RUNX inhibitors were effective as well. As further shown herein, RUNX transcription factor inhibitors or traps (formulated in LNPs) were effective in a choroidal neovascularization (CNV) in vivo model.

[0009] As demonstrated herein, treatment using the nucleic acid encoded RUNX inhibitor blunted the expression of RUNX1 and shifted gene expression from a mesenchymal phenotype towards an epithelial profile across the EMT continuum. Further, the inventors showed that intraocular administration of the nucleic acid encoded RUNX inhibitor strongly reduced proliferation and ocular pathology triggered by injection of human PVR cells in a rabbit eye.

[0010] The present invention therefore demonstrates that artificial nuclei acid, in particular RNA, can be leveraged to provide transcription factor inhibitors for reducing or inhibiting the activity of a target transcription factor in a cell.

[0011] Therefore, the present invention forms the foundation for a plethora of various potential clinical applications that require an inhibition of intracellular target molecules such as intracellular transcription factors.

[0012] In a first aspect, the present invention provides an artificial nucleic acid comprising at least one coding sequence encoding at least one transcription factor inhibitor for reducing or inhibiting the activity of a target transcription factor in a cell.

[0013] In preferred embodiments, the transcription factor inhibitor is a Runt-related transcription factor inhibitor (e.g. RUNX inhibitor) or a Runt-related transcription factor trap (e.g. RUNX trap).

[0014] In particularly preferred embodiments, the Runt-related transcription factor (RUNX) inhibitor comprises or consists of a fusion protein comprising a CBFbeta amino acid sequence element and a SMMHC amino acid sequence element. Such a RUNX inhibitor sequester cellular RUNX by binding to a RUNX protein in the cytosol and preferably trapping the RUNX protein in the cytosol. Accordingly, said RUNX inhibitor can reduce or prevent the translocation of cellular CBFbeta from the cytosol to the nucleus by reducing or preventing its interaction with cellular RUNX (e.g. RUNX1).

[0015] In preferred embodiments, the artificial nucleic acid is an RNA, more preferably an mRNA.

[0016] In a second aspect, the present invention provides a pharmaceutical composition comprising at least one artificial nucleic acid comprising at least one coding sequence encoding at least one transcription factor inhibitor as defined in the first aspect.

[0017] In preferred embodiments, the artificial nucleic acid of the pharmaceutical composition is formulated in polyethylene glycol/peptide polymers, polymeric carriers, or lipid-based carriers (e.g. LNPs). Suitably, the formulation is selected from LNPs.

[0018] In a third aspect, the present invention provides a kit or kit of parts comprising at least one artificial nucleic acid of the first aspect or at least one pharmaceutical composition of the second aspect.

[0019] In further aspects, the present invention provides methods of treating or preventing disease, disorder or condition and first and further medical uses of the artificial nucleic acid, the pharmaceutical composition, or the kit or kit of parts.

[0020] In preferred embodiments, the disease, disorder or condition is an ocular disease, disorder, or condition, preferably proliferative vitreoretinopathy (PVR).

[0021] A further aspect relates to a method of reducing the activity of a transcription factor in a cell or a subject.

### Definitions

[0022] For the sake of clarity and readability the following definitions are provided. Any technical feature mentioned for these definitions may be read on each and every embodiment of the invention. Additional definitions and explanations may be specifically provided in the context of these embodiments.

[0023] Percentages in the context of numbers should be understood as relative to the total number of the respective items. In other cases, and unless the context dictates otherwise, percentages should be understood as percentages by weight (wt.-%).

[0024] About: The term “about” is used when determinants or values do not need to be identical, i.e. 100% the same. Accordingly, “about” means, that a determinant or values may diverge by 1% to 20% preferably by 1% to 10%; in particular, by 1%, 2%, 3%, 4%, 5%, 6%, 7%, 8%, 9%, 10%, 11%, 12%, 13%, 14%, 15%, 16%, 17%, 18%, 19%, 20%. Preferably, “about” means, that a determinant or values may diverge by +/−1%, +/−2%, +/−3%, +/−4%, +/−5%, +/−6%, +/−7%, +/−8%, +/−9%, +/−10%. The skilled person knows that e.g. certain parameters or determinants can slightly vary based on the method how the parameter has been determined.

[0025] Angiogenesis: As used herein, “angiogenesis” means the physiological process through which new blood vessels form from pre-existing vessels. Angiogenesis is particularly relevant to aberrant vessel growth in infants, children, adults, such as during tumor growth, and tumor-like growth, and e.g. in wet age-related macular degeneration, and proliferative diabetic retinopathy.

[0026] Blood vessel growth may occur via the process of angiogenesis and/or vasculogenesis. The processes are distinct, and the involvement of a protein or pathway in vasculogenesis (e.g., during embryonic development) does not necessarily indicate that the protein or pathway is relevant to angiogenesis, much less aberrant angiogenesis. Moreover, the involvement of a protein or pathway in embryonic angiogenesis does not indicate that targeting the protein or pathway would be capable of reducing the aberrant angiogenesis, much less sufficient for inhibiting aberrant angiogenesis or safe for targeting in an infant, child, or adult.

[0027] “Vasculogenesis” means the process of blood vessel formation occurring by a de novo production of endothelial cells. Vasculogenesis is particularly relevant to embryonic blood vessel formation. Vasculogenesis and angiogenesis are distinct from each other in that angiogenesis relates to the development of new blood vessels from (e.g., sprouting or extending from) pre-existing blood vessels, whereas vasculogenesis relates to the formation of new blood vessels that have not extended/sprouted from pre-existing blood vessels (e.g., where there are no pre-existing vessels). For example, if a monolayer of endothelial cells begins sprouting to form capillaries, angiogenesis is occurring. Vasculogenesis, in contrast, is when endothelial precursor cells (angioblasts) migrate and differentiate in response to local cues (such as growth factors and extracellular matrices) to form new blood vessels. These new blood vessels formed by vasculogenesis are then pruned and extended through angiogenesis.

[0028] Cationic: The term “cationic” means that the respective structure bears a positive charge, either permanently or not permanently, for example in response to certain conditions such as pH. Thus, the term “cationic” covers both “permanently cationic” and “cationisable”. The term “permanently cationic” means, e.g., that the respective compound, or group, or atom, is positively charged at any pH value or hydrogen ion activity of its environment. Typically, the positive charge results from the presence of a quaternary nitrogen atom.

[0029] Cationisable: The term “cationisable” as used herein means that a compound, or group or atom, is positively charged at a lower pH and uncharged at a higher pH of its environment. Also in non-aqueous environments where no pH value can be determined, a cationisable compound, group or atom is positively charged at a high hydrogen ion concentration and uncharged at a low concentration or activity of hydrogen ions. It depends on the individual properties of the cationisable or polycationisable compound, in particular the pKa of the respective cationisable group or atom, at which pH or hydrogen ion concentration it is charged or uncharged. In diluted aqueous environments, the fraction of cationisable compounds, groups or atoms bearing a positive charge may be estimated using the so-called Henderson-Hasselbalch equation which is well-known to a person skilled in the art. E.g., in some embodiments, if a compound or moiety is cationisable, it is preferred that it is positively charged at a pH value of about 1 to 9, preferably 4 to 9, 5 to 8 or even 6 to 8, more preferably of a pH value of or below 9, of or below 8, of or below 7, most preferably at physiological pH values, e.g. about 7.3 to 7.4, i.e. under physiological conditions, particularly under physiological salt conditions. In other embodiments, it is preferred that the cationisable compound or moiety is predominantly neutral at physiological pH values, e.g. about 7.0-7.4, but becomes positively charged at lower pH values. In some embodiments, the preferred range of pKa for the cationisable compound or moiety is about 5 to about 7.

[0030] Coding sequence, coding region, cds: The terms “coding sequence” or “coding region” and the corresponding abbreviation “cds” as used herein is intended to refer to a sequence of several nucleotide triplets, which may be translated into a peptide or protein. A coding sequence in the context of the present invention may be a DNA or RNA sequence consisting of a number of nucleotides that may be divided by three, which starts with a start codon and which preferably terminates with a stop codon. Suitably in the context of the invention, the coding sequence encodes at least one transcription factor, accordingly, the coding sequence provides the information that is translated into least one transcription factor inhibitor.

[0031] Derived from: The term “derived from” as used herein in the context of a nucleic acid, i.e. for a nucleic acid “derived from” (another) nucleic acid, means that the nucleic acid, which is derived from (another) nucleic acid, shares e.g. at least 60%, 70%, 80%, 81%, 82%, 83%, 84%, 85%, 86%, 87%, 88%, 89%, 90%, 91%, 92%, 93%, 94%, 95%, 96%, 97%, 98%, or 99% sequence identity or are identical with the nucleic acid from which it is derived. The skilled person is aware that sequence identity is typically calculated for the same types of nucleic acids, i.e. for DNA sequences or for RNA sequences. Thus, it is understood, if a DNA is “derived from” an RNA or if an RNA is “derived from” a DNA, in a first step the RNA sequence is converted into the corresponding DNA sequence (in particular by replacing the uracils (U) by thymidines (T) throughout the sequence) or, vice versa, the DNA sequence is converted into the corresponding RNA sequence (in particular by replacing the T by U throughout the sequence). Thereafter, the sequence identity of the DNA sequences or the sequence identity of the RNA sequences is determined. Preferably, a nucleic acid “derived from” a nucleic acid also refers to nucleic acid, which is modified in comparison to the nucleic acid from which it is derived, e.g. in order to increase RNA stability even further and/or to prolong and/or increase protein production. In the context of amino acid sequences the term “derived from” means that the amino acid sequence, which is derived from (another) amino acid sequence, shares e.g. at least 60%, 70%, 75%, 80%, 81%, 82%, 83%, 84%, 85%, 86%, 87%, 88%, 89%, 90%, 91%, 92%, 93%, 94%, 95%, 96%, 97%, 98%, or 99% sequence identity or are identical with the amino acid sequence from which it is derived.

[0032] Epithelial-mesenchymal transition (EMT): The term epithelial-mesenchymal transition and the corresponding abbreviation “EMT” as used herein will be recognized and understood by the person of ordinary skill in the art, and is e.g. characterized by a loss of cell adhesion, which leads to constriction and extrusion of new mesenchymal cells. EMT is a process by which epithelial cells lose their cell polarity, which leads to cell-cell adhesion loss, and gain of migratory and invasive properties to become mesenchymal stem cells (which are multipotent stromal cells that can differentiate into a variety of cell types). EMT is essential for numerous developmental processes including mesoderm formation and neural tube formation. EMT has also been shown to occur in wound healing, in organ fibrosis and in the initiation of metastasis in cancer progression. EMT, and its reverse process, MET (mesenchymal-epithelial transition) are critical for development of many tissues and organs in the developing embryo, and numerous embryonic events such as gastrulation, neural crest formation, heart valve formation, palatogenesis and myogenesis. Epithelial cells are closely connected to each other by tight junctions, gap junctions and adherens junctions, have an apico-basal polarity, polarization of the actin cytoskeleton and are bound by a basal lamina at their basal surface. Mesenchymal cells, on the other hand, lack this polarization, have a spindle-shaped morphology and interact with each other only through focal points. Epithelial cells express high levels of E-cadherin, whereas mesenchymal cells express those of N-cadherin, fibronectin and vimentin. Thus, EMT entails profound morphological and phenotypic changes to a cell. Based on the biological context, EMT has been categorized into 3 types: developmental (Type I), fibrosis and wound healing (Type II), and cancer (Type III). Loss of E-cadherin is a fundamental event in EMT. Many transcription factors (TFs) that can repress E-cadherin directly or indirectly are considered as EMT-TF (EMT inducing TFs). SNAII/Snail 1, SNAI2/Snail 2 (also known as Slug or Zinc finger protein), Zinc finger E-box binding homeobox 1 and 2 (ZEB1 and ZEB2), transcription factor 3 (TCF3) and krueppel-like factor 8 (KLF8) can bind to the E-cadherin promoter and repress its transcription, whereas factors such as Twist (also referred to as class A basic helix-loop-helix protein 38; bHLHa38), Goosecoid, transcription factor 4 (TCF4), homeobox protein Sineoculis homeobox homolog 1 (SIX1) and fork-head box protein C2 (FOXC2) repress E-cadherin indirectly. Several signaling pathways (transforming growth factor beta (TGFbeta), fibroblast growth factor (FGF), epidermal growth factor (EGF), hepatocyte growth factor (HGF), Wnt/beta-catenin and Notch) and hypoxia may induce EMT. In particular, Ras-MAPK (mitogen-activated protein kinases) activates Snail and Slug. Slug triggers the steps of desmosomal disruption, cell spreading, and partial separation at cell-cell borders, which comprise the first and necessary phase of the EMT process. Wnt signaling pathway regulates EMT in gastrulation, cardiac valve formation and cancer. Activation of Wnt pathway in breast cancer cells induces the EMT regulator SNAIL and upregulates the mesenchymal marker, vimentin. Also, active Wnt/beta-catenin pathway correlates with poor prognosis in breast cancer patients in the clinic. Similarly, TGFbeta activates the expression of SNAIL and ZEB to regulate EMT in heart development, palatogenesis, and cancer. The breast cancer bone metastasis has activated TGF-b signaling, which contributes to the formation of these lesions. However, on the other hand, tumor protein 53 (p53), a well-known tumor suppressor, represses EMT by activating the expression of various microRNAs-miR-200 and miR-34 that inhibit the production of protein ZEB and SNAIL, and thus maintain the epithelial phenotype. After the initial stage of embryogenesis, the implantation of the embryo and the initiation of placenta formation are associated with EMT. The trophoectoderm cells undergo EMT to facilitate the invasion of endometrium and appropriate placenta placement, thus enabling nutrient and gas exchange to the embryo. Later in embryogenesis, during gastrulation, EMT allows the cells to ingress in a specific area of the embryo—the primitive streak in amniotes, and the ventral furrow in Drosophila. The cells in this tissue express E-cadherin and apical-basal polarity. During wound healing, keratinocytes at the border of the wound undergo EMT and undergo re-epithelialization or MET when the wound is closed. Snail2 expression at the migratory front influences this state, as its overexpression accelerates wound healing. Similarly, in each menstrual cycle, the ovarian surface epithelium undergoes EMT during post-ovulatory wound healing. Initiation of metastasis requires invasion, which is enabled by EMT. Carcinoma cells in a primary tumor lose cell-cell adhesion mediated by E-cadherin repression and break through the basement membrane with increased invasive properties and enter the bloodstream through intravasation. Later, when these circulating tumor cells (CTCs) exit the bloodstream to form micro-metastases, they undergo MET for clonal outgrowth at these metastatic sites. Thus, EMT and MET form the initiation and completion of the invasion-metastasis cascade. At this new metastatic site, the tumor may undergo other processes to optimize growth. For example, EMT has been associated with programmed death ligand 1 (PD-L1) expression, particularly in lung cancer. Increased levels of PD-L1 suppresses the immune system which allows the cancer to spread more easily. EMT has been shown to be induced by androgen deprivation therapy in metastatic prostate cancer. Activation of EMT programs via inhibition of the androgen axis provides a mechanism by which tumor cells can adapt to promote disease recurrence and progression. Brachyury, Axl (tyrosine protein kinase receptor UFO), MEK, and Aurora kinase A are molecular drivers of these programs, and inhibitors are currently in clinical trials to determine therapeutic applications. Oncogenic protein kinase C iota type (PKC-iota) can promote melanoma cell invasion by activating Vimentin during EMT. PKC-iota inhibition or knockdown resulted an increase E-cadherin and ras homolog gene family, member A (RhoA) levels while decreasing total Vimentin, phophorylated Vimentin (S39) and partitioning defective 6 homolog alpha (Par6) in metastatic melanoma cells. Cells that undergo EMT gain stem cell-like properties, thus giving rise to Cancer Stem Cells (CSCs).

[0033] Fibrosis: The term “fibrosis” will be recognized and understood by the person of ordinary skill in the art, and inter alia relates to pathological wound healing in which e.g. connective tissue replaces normal parenchymal tissue to the extent that it goes unchecked, leading to considerable tissue remodelling and the formation of permanent scar tissue. Repeated injuries, chronic inflammation and repair are typically susceptible to fibrosis where an accidental excessive accumulation of extracellular matrix components, such as the collagen is produced by fibroblasts, leading to the formation of a permanent fibrotic scar. In response to injury, this is called scarring, and if fibrosis arises from a single cell line, this is called a fibroma. Physiologically, fibrosis acts to deposit connective tissue, which can interfere with or totally inhibit the normal architecture and function of the underlying organ or tissue. Fibrosis can be used to describe the pathological state of excess deposition of fibrous tissue, as well as the process of connective tissue deposition in healing. Defined by the pathological accumulation of extracellular matrix (ECM) proteins, fibrosis results in scarring and thickening of the affected tissue. It is in essence an exaggerated wound healing response which interferes with normal organ function. From the physiological perspective, fibrosis is similar to the process of scarring, in that both involve stimulated fibroblasts laying down connective tissue, including collagen and glycosaminoglycans. The process is initiated when immune cells such as macrophages release soluble factors that stimulate fibroblasts. The most well characterized pro-fibrotic mediator is TGFbeta, which is released by macrophages as well as any damaged tissue between surfaces called interstitium. Other soluble mediators of fibrosis include CTGF, platelet-derived growth factor (PDGF), and interleukin 10 (IL-10). These initiate signal transduction pathways such as the AKT/mTOR and SMAD pathways that ultimately lead to the proliferation and activation of fibroblasts, which deposit extracellular matrix into the surrounding connective tissue. This process of tissue repair is a complex one, with tight regulation of extracellular matrix (ECM) synthesis and degradation ensuring maintenance of normal tissue architecture. However, the entire process, although necessary, can lead to a progressive irreversible fibrotic response if tissue injury is severe or repetitive, or if the wound healing response itself becomes deregulated. Fibrosis can occur in many tissues within the body, typically as a result of inflammation or damage, and examples include pathologies in the lung (e.g. cystic fibrosis, idiopathic pulmonary fibrosis), pathologies in the liver (e.g. cirrhosis), or pathologies in the heart (e.g. myocardial fibrosis).

[0034] Fragment: The term “fragment” as used herein in the context of a nucleic acid sequence (e.g. RNA or a DNA) or an amino acid sequence may typically be a shorter portion of a full-length sequence of e.g. a nucleic acid sequence or an amino acid sequence. Accordingly, a fragment typically consists of a sequence that is identical to the corresponding stretch within the full-length sequence. A preferred fragment of a sequence in the context of the present invention, consists of a continuous stretch of entities, such as nucleotides or amino acids corresponding to a continuous stretch of entities in the molecule the fragment is derived from, which represents at least 40%, 50%, 60%, 70%, 80%, 90%, 95% of the total (i.e. full-length) molecule from which the fragment is derived. The term “fragment” as used throughout the present specification in the context of proteins or peptides may, typically, comprise a sequence of a protein or peptide as defined herein, which is, with regard to its amino acid sequence, N-terminally and/or C-terminally truncated compared to the amino acid sequence of the original protein. The term “fragment” as used throughout the present specification in the context of RNA sequences may, typically, comprise an RNA sequence that is 5′-terminally and/or 3′-terminally truncated compared to the reference RNA sequence. Such truncation may thus occur either on the amino acid level or correspondingly on the nucleic acid level. A sequence identity with respect to such a fragment as defined herein may therefore preferably refer to the entire protein or peptide as defined herein or to the entire (coding) nucleic acid molecule of such a protein or peptide.

[0035] Identity (of a sequence): The term “identity” as used herein in the context of a nucleic acid sequence or an amino acid sequence will be recognized and understood by the person of ordinary skill in the art, and is e.g. intended to refer to the percentage to which two sequences are identical. To determine the percentage to which two sequences are identical, e.g. nucleic acid sequences or amino acid (aa) sequences, preferably the aa sequences encoded by the nucleic acid sequence as defined herein or the aa sequences themselves, the sequences can be aligned in order to be subsequently compared to one another. Therefore, e.g. a position of a first sequence may be compared with the corresponding position of the second sequence. If a position in the first sequence is occupied by the same residue as is the case at a position in the second sequence, the two sequences are identical at this position. If this is not the case, the sequences differ at this position. If insertions occur in the second sequence in comparison to the first sequence, gaps can be inserted into the first sequence to allow a further alignment. If deletions occur in the second sequence in comparison to the first sequence, gaps can be inserted into the second sequence to allow a further alignment. The percentage to which two sequences are identical is then a function of the number of identical positions divided by the total number of positions including those positions which are only occupied in one sequence. The percentage to which two sequences are identical can be determined using an algorithm, e.g. an algorithm integrated in the BLAST program.

[0036] Neovascularization: The term “neovascularization” has to be understood as the (natural) process of formation of new blood vessels. Typically, neovascularization is in the form of functional microvascular networks, capable of perfusion by red blood cells, that form to serve as collateral circulation in response to local poor perfusion or ischemia. Growth factors that inhibit neovascularization include those that affect endothelial cell division and differentiation. These growth factors often act in a paracrine or autocrine fashion; they include fibroblast growth factor, placental growth factor, insulin-like growth factor, hepatocyte growth factor, and platelet-derived endothelial growth factor. Typically, there are three different pathways that comprise neovascularization: (1) vasculogenesis, (2) angiogenesis, and (3) arteriogenesis. Several pathologies and diseases can be associated with aberrant neovascularization, including ocular pathologies such as corneal neovascularization, retinopathy of prematurity, diabetic retinopathy, age-related macular degeneration, and choroidal neovascularization. Aberrant neovascularization can also be associated with cardiovascular diseases e.g. Ischemic heart disease.

[0037] Nucleic acid, nucleic acid molecule: The terms “nucleic acid” or “nucleic acid molecule” will be recognized and understood by the person of ordinary skill in the art. The term “nucleic acid” or “nucleic acid molecule” as used herein preferably refers to DNA (molecules) or RNA (molecules). It is preferably used synonymously with the term polynucleotide. Preferably, a nucleic acid or a nucleic acid molecule is a polymer comprising or consisting of nucleotide monomers, which are covalently linked to each other by phosphodiester-bonds of a sugar/phosphate-backbone. The term “nucleic acid molecule” also encompasses modified nucleic acid molecules, such as base-modified, sugar-modified, or backbone-modified DNA or RNA molecules as defined herein.

[0038] Nucleic acid sequence, DNA sequence, RNA sequence: The terms “nucleic acid sequence”, “DNA sequence”, “RNA sequence” will be recognized and understood by the person of ordinary skill in the art, and e.g. refer to a particular and individual order of the succession of its nucleotides.

[0039] Nucleic species: In the context of the invention, the term “nucleic acid species” is not restricted to mean one single molecule but is understood to comprise an ensemble of essentially identical nucleic acid molecules. Accordingly, it may relate to a plurality of essentially identical nucleic acid molecules.

[0040] RNA species: In the context of the invention, the term “RNA species” is not restricted to mean one single molecule but is understood to comprise an ensemble of essentially identical RNA molecules. Accordingly, it may relate to a plurality of essentially identical RNA molecules.

[0041] RNA: The term “RNA” is the usual abbreviation for ribonucleic acid. It is a nucleic acid molecule, i.e. a polymer consisting of nucleotide monomers. These nucleotides are usually adenosine-monophosphate (AMP), uridine-monophosphate (UMP), guanosine-monophosphate (GMP) and cytidine-monophosphate (CMP) monomers or analogs thereof, which are connected to each other along a so-called backbone. The backbone is typically formed by phosphodiester bonds between the sugar, i.e. ribose, of a first and a phosphate moiety of a second, adjacent monomer. The specific order of the monomers, i.e. the order of the bases linked to the sugar/phosphate-backbone, is called the RNA sequence. RNA can be obtained by transcription of a DNA sequence, e.g., inside a cell or in vitro. In the context of the invention, the RNA may be obtained by RNA in vitro transcription. Alternatively, RNA may be obtained by chemical synthesis.

[0042] RNA in vitro transcription: The terms “RNA in vitro transcription” or “in vitro transcription” relate to a process wherein RNA is synthesized in a cell-free system in vitro. RNA may be obtained by DNA-dependent in vitro transcription of an appropriate DNA template, which is typically a linear DNA template (e.g. linearized plasmid DNA or PCR product). The promoter for controlling RNA in vitro transcription can be any promoter for any DNA-dependent RNA polymerase. Particular examples of DNA-dependent RNA polymerases are the T7, T3, SP6, or Syn5 RNA polymerases. In the context of the invention, the DNA template is typically linearized with a suitable restriction enzyme before it is subjected to RNA in vitro transcription. Reagents typically used in RNA in vitro transcription include: a DNA template (linearized plasmid DNA or PCR product) with a promoter sequence that has a high binding affinity for its respective RNA polymerase such as bacteriophage-encoded RNA polymerases (T7, T3, SP6, or Syn5); ribonucleotide triphosphates (NTPs) for the four bases (adenine, cytosine, guanine and uracil); optionally, a cap analogue as defined herein; optionally, modified nucleotides as defined herein; a DNA-dependent RNA polymerase capable of binding to the promoter sequence within the DNA template (e.g. 17, T3, SP6, or Syn5 RNA polymerase); optionally, a ribonuclease (RNase) inhibitor to inactivate any potentially contaminating RNase; optionally, pyrophosphatase; MgCl₂; a buffer (TRIS or HEPES) to maintain a suitable pH value, which can also contain antioxidants (e.g. DTT), and/or polyamines such as spermidine.

[0043] Variant (of a sequence); The term “variant” as used herein in the context of a nucleic acid sequence will be recognized and understood by the person of ordinary skill in the art, and is e.g. intended to refer to a variant of a nucleic acid sequence derived from another nucleic acid sequence. E.g., a variant of a nucleic acid sequence may exhibit one or more nucleotide deletions, insertions, additions and/or substitutions compared to the nucleic acid sequence from which the variant is derived. A variant of a nucleic acid sequence may at least 50%, 60%, 70%, 80%, 90%, or 95% identical to the nucleic acid sequence the variant is derived from. A variant may be a functional variant in the sense that the variant has retained at least 50%, 60%, 70%, 80%, 90%, or 95% or more of the function of the sequence where it is derived from. A “variant” of a nucleic acid sequence may have at least 70%, 75%, 80%, 85%, 90%, 95%, or 99% nucleotide identity over a stretch of at least 30, 50, 75 or 100 nucleotide of such nucleic acid sequence.

[0044] The term “variant” as used herein in the context of proteins or peptides is e.g. intended to refer to a proteins or peptide variant having an amino acid sequence which differs from the original sequence in one or more mutation(s)/substitution(s), such as one or more substituted, inserted and/or deleted amino acid(s). Preferably, these fragments and/or variants have the same, or a comparable specific property. Insertions and substitutions are possible, in particular, at those sequence positions which cause no modification to the three-dimensional structure or do not affect the binding region. Modifications to a three-dimensional structure by insertion(s) or deletion(s) can easily be determined e.g. using CD spectra (circular dichroism spectra). A variant of a protein may be a functional variant of the protein, which means that the variant exerts essentially the same, or at least 40%, 50%, 60%, 70%, 80%, 90% of the function of the protein it is derived from. A “variant” of a protein or peptide may have at least 70%, 75%, 80%, 85%, 90%, 95%, 98% or 99% amino acid identity over a stretch of at least 30, 50, 75 or 100 amino acids of such protein or peptide.

### DETAILED DESCRIPTION OF THE INVENTION

[0045] Where reference is made to “SEQ ID NOs” of other patent applications or patents, said sequences, e.g. amino acid sequences or nucleic acid sequences, are explicitly incorporated herein by reference. For “SEQ ID NOs” provided herein, information provided under “feature key”, i.e. “source” (for nucleic acids or proteins) or “misc_feature” (for nucleic acids) or “REGION” (for proteins). (in the sequence listing according to WIPO ST.26 Standard) is also explicitly included herein in its entirety. Where reference is made to “SEQ ID NOs” in the context of RNA sequences, the skilled person will be able to derive RNA sequences from the referenced SEQ ID NOs also in cases where DNA sequences are provided. Where reference is made to “SEQ ID NOs” in the context of DNA sequences, the skilled person will be able to derive respective DNA sequences from the referenced SEQ ID NOs also in cases where RNA sequences are provided.

### 1: Nucleic Acid Encoding at Least One Transcription Factor Inhibitor:

[0046] In a first aspect, the invention provides a nucleic acid encoding at least one transcription factor inhibitor.

[0047] It has to be noted that specific features and embodiments that are described in the context of the first aspect of the invention, that is the nucleic acid of the invention, are likewise applicable to the second aspect (pharmaceutical composition of the invention), the third aspect (kit or kit of parts of the invention), or further aspects including medical uses and method of treatments.

[0048] In preferred embodiments, the nucleic acid encoding the at least one transcription factor inhibitor is an artificial nucleic acid.

[0049] The term “artificial nucleic acid” as used herein is intended to refer to a nucleic acid that does not occur naturally. In other words, an artificial nucleic acid may be understood as a non-natural nucleic acid molecule. Such nucleic acid molecules may be non-natural due to its individual sequence (e.g. G/C content modified coding sequence, UTRs) and/or due to other modifications, e.g. structural modifications of nucleotides. Typically, artificial nucleic acid may be designed and/or generated by genetic engineering to correspond to a desired artificial sequence of nucleotides. In this context, an artificial nucleic acid is a sequence that may not occur naturally, i.e. a sequence that differs from the wild type sequence/the naturally occurring sequence by at least one nucleotide. The term “artificial nucleic acid” is not restricted to mean “one single molecule” but is understood to comprise an ensemble of essentially identical nucleic acid molecules. The term “artificial nucleic acid” as used herein may relate to artificial DNA or, preferably, to artificial RNA. Preferably, the artificial nucleic is selected from an artificial DNA or an artificial RNA.

[0050] In preferred embodiments, the artificial nucleic acid comprises at least one coding sequence encoding at least one transcription factor inhibitor.

[0051] The term “target transcription factor” as used herein is intended to refer to the cellular transcription factor that is intended to be inhibited by the at least one transcription factor inhibitor (encoded by the artificial nucleic acid). In various embodiments, inhibiting the “target transcription factor” is associated with advantageous cellular or physiological effects as further outlined herein.

[0052] “Cellular” in the context of the invention e.g. in the context of a protein (e.g. “cellular target transcription factor” or “cellular transcription co-factor”) relates to the respective protein that is present in a cellular environment. Accordingly, the term refers to the respective physiological protein and not to the protein that is provided by the artificial nucleic acid of the invention.

[0053] The inhibition of the target transcription factor can be a direct inhibition (e.g. via an interaction of the transcription factor inhibitor with the cellular target transcription factor) resulting in reduced transcriptional activity of the target transcription factor in a cell. An example is the direct inhibition of the cellular target transcription factor RUNX e.g. via a direct interaction of the provided transcription factor inhibitor with the cellular target transcription factor RUNX, resulting in reduced transcriptional activity of the target transcription factor RUNX in a cell.

[0054] Alternatively, the inhibition of the target transcription factor can be an indirect inhibition (e.g. via an interaction of the transcription factor inhibitor with a co-factor of the target transcription factor) which may also result in a reduced transcriptional activity of the target transcription factor in a cell. An example is the indirect inhibition of the cellular target transcription factor RUNX e.g. via interaction of the provided transcription factor inhibitor with its co-factor CBFbeta which may also result in reduced transcriptional activity of the target transcription factor RUNX in a cell as e.g. the interaction of cellular CBFbeta with cellular RUNX is disturbed.

[0055] Preferably, the artificial nucleic acid additionally comprises at least one heterologous nucleic acid sequence element. A preferred heterologous nucleic acid sequence may be selected from at least one heterologous untranslated region (UTR).

[0056] The term “heterologous” sequence as used herein is intended to refer to a nucleic acid sequence that is not from the same gene or the same genomic fusion. Accordingly, heterologous sequences may be derivable from the same organism (e.g. human) or from a different organism. Heterologous sequences do naturally (in nature) not occur in the same nucleic acid molecule.

[0057] In preferred embodiments, the artificial nucleic acid comprises at least one coding sequence encoding at least one transcription factor inhibitor, wherein the transcription factor inhibitor reduces or inhibits the activity of a target transcription factor in a cell, wherein the nucleic acid comprises at least one heterologous untranslated region (UTR).

[0058] In some embodiments, the encoded transcription factor inhibitor is not an intrabody.

[0059] In preferred embodiments, the transcription factor inhibitor (that is provided by the artificial nucleic acid) is produced in the cytosol upon administration of the artificial nucleic acid to a cell, tissue, or subject.

[0060] Accordingly, the administration of the artificial nucleic acid (e.g. RNA) to a cell, tissue, or subject leads to a translation of the at least one coding sequence into at least one transcription factor inhibitor protein. Accordingly, whenever reference is made to a “produced transcription factor inhibitor”, the term relates to the protein product that is generated from the artificial nucleic acid of the invention by translating the coding sequence of the nucleic acid into a protein. Accordingly, functional and structural features and embodiments that are described herein relating to the “transcription factor inhibitor” or relating to the “(produced) transcription factor inhibitor” should be understood to refer to transcription factor inhibitor proteins that are produced/translated in the cytosol upon administration of the artificial nucleic acid of the invention to a cell, tissue, or subject.

[0061] In preferred embodiments, upon administration of the artificial nucleic acid to a cell or subject, the produced transcription factor inhibitor is a dominant negative inhibitor of the target transcription factor. In preferred embodiments, the produced transcription factor inhibitor is a dominant negative inhibitor of the target transcription factor and/or its transcription co-factor.

[0062] In general, a dominant negative inhibition is a phenomenon in which the function of a wild-type gene product (e.g. a transcription factor protein or its transcription co-factor protein) is impaired by a co-expressed mutant or variant of the same gene product or a related gene product.

[0063] In preferred embodiments, upon administration of the artificial nucleic acid to a cell or subject, the produced transcription factor inhibitor binds to the cellular target transcription factor.

[0064] Accordingly, the transcription factor inhibitor comprises at least one amino acid sequence that facilitates binding to the target transcription factor (e.g. RUNX). Advantageously, the binding of the (produced) transcription factor inhibitor to the cellular target transcription factor is strong enough to reduce the activity of a target transcription factor in a cell.

[0065] In preferred embodiments, upon administration of the artificial nucleic acid to a cell or subject, the produced transcription factor inhibitor binds to at least one transcription co-factor of the target transcription factor. Preferably, the transcription co-factor is selected from a transcription co-activator.

[0066] The term “transcription co-factor of the target transcription factor” relates to any factor (e.g. co-factor protein, non-coding nucleic acid e.g. a non-coding RNA) that is able to modulate the activity or function of the target transcription factor. Typically, a transcription co-factor can interact with a transcription factor to promote the formation of transcription complexes, or a transcription co-factor can influence the affinity of a transcription factor to its target DNA (e.g. promoter sequence). Most transcription factors require transcription co-factors to be fully functional. For gene transcription to occur, a number of transcription factors must bind to DNA regulatory sequences. This collection of transcription factors, in turn, inter alia recruit intermediary proteins such as cofactors that allow efficient recruitment of the preinitiation complex and RNA polymerase. Thus, for a single transcription factor to initiate transcription, all of these other proteins must typically also be present, and the transcription factor must be in a state where it can bind to them if necessary. Typically, a transcription co-factor can have inhibitory or activatory function. In case of activatory functions, such transcription co-factors are also called co-activators. An example of a transcription co-factor is CBFbeta which is a co-activator of the transcription factor RUNX (e.g. RUNX1).

[0067] In preferred embodiments, upon administration of the artificial nucleic acid to a cell or subject, the produced transcription factor inhibitor reduces or prevents interaction of the cellular target transcription factor with its target DNA.

[0068] The term “target DNA” relates to the DNA sequence in the nucleus to which a transcription factor binds to. Typically, a transcription factor comprises at least one DNA-binding domain, which attaches to a specific sequence of DNA adjacent to the genes that they regulate. Target DNA sequences may comprise DNA regulatory sequences, for example DNA promoter sequences or enhancer sequences. In the context of the invention, the interaction of the target transcription factor with its target DNA can be reduced by e.g. reducing or preventing translocation of the target transcription factor into the nucleus and/or by reducing translocation of a co-factor of the target transcription factor into the nucleus. It can also be reduced by mutations in the transcription factor that reduce the affinity of binding to DNA.

[0069] In preferred embodiments, upon administration of the artificial nucleic acid to a cell or subject, the produced transcription factor inhibitor reduces or prevents interaction of the cellular target transcription factor with at least one of its cellular transcription co-factors. Suitably, the transcription co-factor is selected from a transcription co-activator.

[0070] For example, the interaction of the target transcription factor (e.g. RUNX) with at least one of its transcription co-factors (e.g. CBFbeta) may be reduced by binding of the produced transcription factor inhibitor to the cellular target transcription factor (which prevents interaction of the transcription factor with its co-factor). Alternatively, the interaction of the target transcription factor with at least one of its transcription co-factors may be reduced by binding of the produced transcription factor inhibitor to the cellular target transcription co-factor (which prevents interaction of the transcription factor with its co-factor).

[0071] In preferred embodiments, upon administration of the artificial nucleic acid to a cell or subject, the produced transcription factor inhibitor reduces or prevents nuclear translocation of the cellular target transcription factor and/or its transcription co-factor. In particularly preferred embodiments, the produced transcription factor inhibitor reduces or prevents nuclear translocation of the cellular target transcription factor and its transcription co-factor.

[0072] The term “nuclear translocation” relates to the transport of a protein from the cytosol into the nucleus. Proteins are typically translocated into the nucleus through nuclear pore complexes (NPCs) by receptor-mediated import pathways. For getting transported into the nucleus, proteins typically comprise specific amino acid sequences (e.g. nuclear localization signal, NLS) that promote nuclear translocation or they have to interact with proteins that comprise such specific amino acid sequences (e.g. NLS).

[0073] In the context of the invention, the transcription factor inhibitor (that is provided by the nucleic acid) may be configured to reduce or prevent nuclear translocation of the cellular target transcription factor (e.g., RUNX). The reduction or prevention of nuclear translocation may be achieved by binding of the produced transcription factor inhibitor to the cellular target transcription factor in the cytosol. Alternatively or in addition, the reduction or prevention of nuclear translocation of the target transcription factor (e.g., RUNX) may lead to a reduction or prevention of nuclear translocation of proteins that interact with said target transcription factor (e.g. transcription co-factors of RUNX such as CBFbeta).

[0074] In preferred embodiments, upon administration of the artificial nucleic acid to a cell or subject, the produced transcription factor inhibitor reduces the activity of the target transcription factor.

[0075] The “reducing the activity of the target transcription factor” can be a direct e.g. via a direct interaction of the produced transcription factor inhibitor with the cellular target transcription factor (e.g. RUNX), or indirect e.g. via interaction of the produced transcription factor inhibitor with at least one cellular transcription co-factor (e.g. CBFbeta) of the respective target transcription factor (e.g. RUNX).

[0076] In preferred embodiments, upon administration of the artificial nucleic acid to a cell or subject, the produced transcription factor inhibitor reduces the cellular expression of the target transcription factor.

[0077] In cells, the expression of transcription factors is often regulated by self-regulatory feedback loops. That means that e.g. transcription factors proteins can activate their own expression (self-activation). As the transcription factor inhibitor of the present invention may reduce or inhibit the activity of the target transcription factor in a cell (e.g. RUNX), that can also lead to a reduced expression of the target transcription factor as such. Accordingly, a further reduction of the cellular expression of the target transcription factor may increase or enhance advantageous cellular or physiological effects of the transcription factor inhibitor that is provided by the artificial nucleic acid.

[0078] Typically, transcription factors bind to either enhancer or promoter regions of DNA adjacent to the genes that they regulate. Depending on the transcription factor, the transcription of the adjacent gene is either up- or down-regulated. Transcription factors use a variety of mechanisms for the regulation of gene expression. Typically, transcription factors directly control or regulate the expression of various different proteins in a cell e.g. by directly activating the transcription of genes. In addition, these directly regulated gene-products can also be involved in the regulation and expression of other gene-products. Accordingly, the transcription factor inhibitor may reduce (or alternatively increase) the cellular expression of proteins that are directly controlled or regulated by the target transcription factor and, additionally, reduce or increase the cellular expression of further proteins that are indirectly controlled or regulated by the target transcription factor (e.g. via the above described gene-products that are directly controlled by the target transcription factor).

[0079] In preferred embodiments, upon administration of the artificial nucleic acid to a cell or subject, the produced transcription factor inhibitor reduces the cellular expression of proteins that are controlled or regulated by the target transcription factor. Notably, “controlled or regulated” in that context may be directly or indirectly, preferably directly.

[0080] Alternatively or additionally, the produced transcription factor inhibitor increases the cellular expression of proteins that are controlled or regulated by the target transcription factor. Notably, “controlled or regulated” in that context may be directly or indirectly, preferably directly.

[0081] In preferred embodiments, the encoded transcription factor inhibitor is a transcription factor trap preferably configured to bind and trap the target transcription factor in the cytosol.

[0082] The term “transcription factor trap” in the context of the invention has to be understood as a protein that is configured to bind to a cellular target transcription factor (e.g. via an amino acid sequence that interacts or binds to the target transcription factor) and is additionally capable of capturing or trapping said target transcription factor in the cytosol (e.g. via an amino acid sequence that blocks nuclear translocation of the target transcription factor). One example of a transcription factor trap in the context of the invention is a RUNX trap, in particular a RUNX1 trap. A “transcription factor trap” is particularly suitable in the context of the invention as the target transcription factor is blocked from entering into the nucleus where transcription factors typically act. Blocking of the target transcription factor to enter into the nucleus (e.g. RUNX) may also be associated with a reduced or blocked transport of its transcription co-factors (e.g. CBFbeta), in particular in cases where the transcription co-factors of the target transcription factor is transported via the transcription factor into the nucleus. Of course, in such a case, a capturing of the target transcription factor in the cytosol (e.g. RUNX) would, at the same time, prevent or reduce the transport of its transcription co-factors (e.g. CBFbeta) into the nucleus.

[0083] In preferred embodiments, the target transcription factor is selected from a transcription factor that has an aberrant transcription factor activity or pathologic transcription factor activity.

[0084] Suitably, the aberrant or pathologic transcription factor activity is an overexpression and/or an overactivation.

[0085] In preferred embodiments, the target transcription factor is selected from a transcription factor that has an aberrant or pathologic transcription factor activity (e.g. overexpression and/or an overactivation) associated with epithelial to mesenchymal transition (EMT), pathological cell proliferation, aberrant angiogenesis, aberrant neovascularization, degeneration, and/or fibrosis.

[0086] An example of a target transcription factor that shows pathologic transcription factor activity (e.g. overexpression and/or an overactivation) associated with EMT, pathological cell proliferation, aberrant angiogenesis, aberrant neovascularization, degeneration, and/or fibrosis is the Runt-related transcription factor RUNX1.

[0087] In preferred embodiments, the target transcription factor is selected from a transcription factor that is overexpressed and/or overactive in a disease, disorder, or condition.

[0088] In preferred embodiments, the target transcription factor is selected from a transcription factor that is overexpressed or overactive in an ocular disease, disorder, or condition.

[0089] In preferred embodiments, the target transcription factor is selected from a human transcription factor, preferably a member of the following list (List A): AC008770.3; AC023509.3; AC092835.1; AC138696.1; ADNP; ADNP2; AEBP1; AEBP2; AHCTF1; AHDC1; AHR; AHRR; AIRE; AKAP8; AKAP8L; AKNA; ALX1; ALX3; ALX4; ANHX; ANKZF1; AP1; AR; ARGFX; ARHGAP35; ARID2; ARID3A; ARID3B; ARID3C; ARID5A; ARID5B; ARNT; ARNT2; ARNTL; ARNTL2; ARX; ASCL1; ASCL2; ASCL3; ASCL4; ASCL5; ASH1L; ATF1; ATF2; ATF3; ATF4; ATF5; ATF6; ATF6B; ATF7; ATMIN; ATOH1; ATOH7; ATOH8; BACH1; BACH2; BARHL1; BARHL2; BARX1; BARX2; BATF; BATF2; BATF3; BAZ2A; BAZ2B; BBX; BCL11A; BCL11B; BCL6; BCL6B; BHLHA15; BHLHA9; BHLHE22; BHLHE23; BHLHE40; BHLHE41; BNC1; BNC2; BORCS8-MEF2B; BPTF; BRF2; BSX; C11orf95; CAMTA1; CAMTA2; CARF; CASZ1; CBX2; CC2D1A; CCDC169-SOHLH2; CCDC17; CDC5L; CDX1; CDX2; CDX4; CEBPA; CEBPB; CEBPD; CEBPE; CEBPG; CEBPZ; CENPA; CENPB; CENPBD1; CENPS; CENPT; CENPX; CGGBP1; CHAMP1; CHCHD3; CIC; CLOCK; CPEB1; CPXCR1; CREB1; CREB3; CREB3L1; CREB3L2; CREB3L3; CREB3L4; CREB5; CREBL2; CREBZF; CREM; CRX; CSRNP1; CSRNP2; CSRNP3; CTCF; CTCFL; CUX1; CUX2; CXXC1; CXXC4; CXXC5; DACH1; DACH2; DBP; DBX1; DBX2; DDIT3; DEAF1; DLX1; DLX2; DLX3; DLX4; DLX5; DLX6; DMBX1; DMRT1; DMRT2; DMRT3; DMRTA1; DMRTA2; DMRTB1; DMRTC2; DMTF1; DNMT1; DNTTIP1; DOT1L; DPF1; DPF3; DPRX; DR1; DRAP1; DRGX; DUX1; DUX3; DUX4; DUXA; DZIP1; E2F1; E2F2; E2F3; E2F4; E2F5; E2F6; E2F7; E2F8; E4F1; EBF1; EBF2; EBF3; EBF4; EEA1; EGR1; EGR2; EGR3; EGR4; EHF; ELF1; ELF2; ELF3; ELF4; ELF5; ELK1; ELK3; ELK4; EMX1; EMX2; EN1; EN2; EOMES; EPAS1; ERF; ERG; ESR1; ESR2; ESRRA; ESRRB; ESRRG; ESX1; ETS1; ETS2; ETV1; ETV2; ETV3; ETV3L; ETV4; ETV5; ETV6; ETV7; EVX1; EVX2; FAM170A; FAM200B; FBXL19; FERD3L; FEV; FEZF1; FEZF2; FIGLA; FIZ1; FLI1; FLYWCH1; FOS; FOSB; FOSL1; FOSL2; FOXA1; FOXA2; FOXA3; FOXB1; FOXB2; FOXC1; FOXC2; FOXD1; FOXD2; FOXD3; FOXD4; FOXD4L1; FOXD4L3; FOXD4L4; FOXD4L5; FOXD4L6; FOXE1; FOXE3; FOXF1; FOXF2; FOXG1; FOXH1; FOXI1; FOXI2; FOXI3; FOXJ1; FOXJ2; FOXJ3; FOXK1; FOXK2; FOXL1; FOXL2; FOXM1; FOXN1; FOXN2; FOXN3; FOXN4; FOXO1; FOXO3; FOXO4; FOX06; FOXP1; FOXP2; FOXP3; FOXP4; FOXQ1; FOXR1; FOXR2; FOXS1; GABPA; GATA1; GATA2; GATA3; GATA4; GATA5; GATA6; GATAD2A; GATAD2B; GBX1; GBX2; GCM1; GCM2; GFI1; GFI1B; GLI1; GLI2; GLI3; GLI4; GLIS1; GLIS2; GLIS3; GLMP; GLYR1; GMEB1; GMEB2; GPBP1; GPBP1L1; GRHL1; GRHL2; GRHL3; GSC; GSC2; GSX1; GSX2; GTF2B; GTF21; GTF2IRD1; GTF2IRD2; GTF2IRD2B; GTF3A; GZF1; HAND1; HAND2; HBP1; HDX; HELT; HES1; HES2; HES3; HES4; HES5; HES6; HES7; HESX1; HEY1; HEY2; HEYL; HHEX; HIC1; HIC2; HIF1A; HIF3A; HINFP; HIVEP1; HIVEP2; HIVEP3; HKR1; HLF; HLX; HMBOX1; HMG20A; HMG20B; HMGA1; HMGA2; HMGN3; HMX1; HMX2; HMX3; HNF1A; HNF1B; HNF4A; HNF4G; HOMEZ; HOXA1; HOXA10; HOXA11; HOXA13; HOXA2; HOXA3; HOXA4; HOXA5; HOXA6; HOXA7; HOXA9; HOXB1; HOXB13; HOXB2; HOXB3; HOXB4; HOXB5; HOXB6; HOXB7; HOXB8; HOXB9; HOXC10; HOXC11; HOXC12; HOXC13; HOXC4; HOXC5; HOXC6; HOXC8; HOXC9; HOXD1; HOXD10; HOXD11; HOXD12; HOXD13; HOXD3; HOXD4; HOXD8; HOXD9; HSF1; HSF2; HSF4; HSF5; HSFX1; HSFX2; HSFY1; HSFY2; IKZF1; IKZF2; IKZF3; IKZF4; IKZF5; INSM1; INSM2; IRF1; IRF2; IRF3; IRF4; IRF5; IRF6; IRF7; IRF8; IRF9; IRX1; IRX2; IRX3; IRX4; IRX5; IRX6; ISL1; ISL2; ISX; JAZF1; JDP2; JRK; JRKL; JUN; JUNB; JUND; KAT7; KCMF1; KCNIP3; KDM2A; KDM2B; KDM5B; KIN; KLF1; KLF10; KLF11; KLF12; KLF13; KLF14; KLF15; KLF16; KLF17; KLF2; KLF3; KLF4; KLF5; KLF6; KLF7; KLF8; KLF9; KMT2A; KMT2B; L3MBTL1; L3MBTL3; L3MBTL4; LBX1; LBX2; LCOR; LCORL; LEF1; LEUTX; LHX1; LHX2; LHX3; LHX4; LHX5; LHX6; LHX8; LHX9; LIN28A; LIN28B; LIN54; LMX1A; LMX1B; LTF; LYL1; MAF; MAFA; MAFB; MAFF; MAFG; MAFK; MAX; MAML1; MAML2; MAZ; MBD1; MBD2; MBD3; MBD4; MBD6; MBNL2; MECOM; MECP2; MEF2A; MEF2B; MEF2C; MEF2D; MEIS1; MEIS2; MEIS3; MEOX1; MEOX2; MESP1; MESP2; MGA; MITF; MIXL1; MKX; MLX; MLXIP; MLXIPL; MNT; MNX1; MSANTD1; MSANTD3; MSANTD4; MSC; MSGN1; MSX1; MSX2; MTERF1; MTERF2; MTERF3; MTERF4; MTF1; MTF2; MXD1; MXD3; MXD4; MXI1; MYB; MYBL1; MYBL2; MYC; MYCL; MYCN; MYF5; MYF6; MYNN; MYOD1; MYOG; MYPOP; MYRF; MYRFL; MYSM1; MYT1; MYT1L; MZF1; NACC2; NAIF1; NANOG; NANOGNB; NANOGP8; NCOA1; NCOA2; NCOA3; NEUROD1; NEUROD2; NEUROD4; NEUROD6; NEUROG1; NEUROG2; NEUROG3; NF-kappaB; NFAT5; NFAT5A; NFATC1; NFATC2; NFATC3; NFATC4; NFE2; NFE2L1; NFE2L2; NFE2L3; NFE4; NFIA; NFIB; NFIC; NFIL3; NFIX; NFKB1; NFKB2; NFX1; NFXL1; NFYA; NFYB; NFYC; NHLH1; NHLH2; NKRF; NKX1-1; NKX1-2; NKX2-1; NKX2-2; NKX2-3; NKX2-4; NKX2-5; NKX2-6; NKX2-8; NKX3-1; NKX3-2; NKX6-1; NKX6-2; NKX6-3; NME2; NOBOX; NOTO; NOTCH1; NOTCH2; NOTCH3; NOTCH4; NPAS1; NPAS2; NPAS3; NPAS4; NROB1; NR1D1; NR1D2; NR1H2; NR1H3; NR1H4; NR112; NR113; NR2C1; NR2C2; NR2E1; NR2E3; NR2F1; NR2F2; NR2F6; NR3C1; NR3C2; NR4A1; NR4A2; NR4A3; NR5A1; NR5A2; NR6A1; NRF1; NRL; OLIG1; OLIG2; OLIG3; ONECUT1; ONECUT2; ONECUT3; OSR1; OSR2; OTP; OTX1; OTX2; OVOL1; OVOL2; OVOL3; PA2G4; PATZ1; PAX1; PAX2; PAX3; PAX4; PAX5; PAX6; PAX7; PAX8; PAX9; PBX1; PBX2; PBX3; PBX4; PCGF2; PCGF6; PDX1; PEG3; PGR; PHF1; PHF19; PHF20; PHF21A; PHOX2A; PHOX2B; PIN1; PITX1; PITX2; PITX3; PKNOX1; PKNOX2; PLAG1; PLAGL1; PLAGL2; PLSCR1; POGK; POU1F1; POU2AF1; POU2F1; POU2F2; POU2F3; POU3F1; POU3F2 (BRN2); POU3F3; POU3F4; POU4F1; POU4F2; POU4F3; POU5F1; POU5F1B; POU5F2; POU6F1; POU6F2; PPARA; PPARD; PPARG; PRDM1; PRDM10; PRDM12; PRDM13; PRDM14; PRDM15; PRDM16; PRDM2; PRDM4; PRDM5; PRDM6; PRDM8; PRDM9; PREB; PRMT3; PROP1; PROX1; PROX2; PRR12; PRRX1; PRRX2; PTF1A; PURA; PURB; PURG; RAG1; RARA; RARB; RARG; RAX; RAX2; RBAK; RBCK1; RBPJ; RBPJL; RBSN; REL; RELA; RELB; REPIN1; REST; REXO4; RFX1; RFX2; RFX3; RFX4; RFX5; RFX6; RFX7; RFX8; RHOXF1; RHOXF2; RHOXF2B; RLF; RORA; RORB; RORC; RREB1; RUNX1; RUNX2; RUNX3; RXRA; RXRB; RXRG; SAFB; SAFB2; SALL1; SALL2; SALL3; SALL4; SATB1; SATB2; SCMH1; SCML4; SCRT1; SCRT2; SCX; SEBOX; SETBP1; SETDB1; SETDB2; SGSM2; SHOX; SHOX2; SIM1; SIM2; SIX1; SIX2; SIX3; SIX4; SIX5; SIX6; SKI; SKIL; SKOR1; SKOR2; SLC2A4RG; SMAD1; SMAD3; SMAD4; SMAD5; SMAD9; SMYD3; SNAI1; SNAI2; SNAI3; SNAPC2; SNAPC4; SNAPC5; SOHLH1; SOHLH2; SON; SOX1; SOX10; SOX11; SOX12; SOX13; SOX14; SOX15; SOX17; SOX18; SOX2; SOX21; SOX3; SOX30; SOX4; SOX5; SOX6; SOX7; SOX8; SOX9; SP1; SP100; SP110; SP140; SP140L; SP2; SP3; SP4; SP5; SP6; SP7; SP8; SP9; SPDEF; SPEN; SPI1; SPIB; SPIC; SPZ1; SRCAP; SREBF1; SREBF2; SRF; SRY; ST18; STAT1; STAT2; STAT3; STAT4; STAT5A; STAT5B; STAT6; T; TAZ; TAL1; TAL2; TBP; TBPL1; TBPL2; TBR1; TBX1; TBX10; TBX15; TBX18; TBX19; TBX2; TBX20; TBX21; TBX22; TBX3; TBX4; TBX5; TBX6; TCF12; TCF15; TCF20; TCF21; TCF23; TCF24; TCF3; TCF4; TCF7; TCF7L1; TCF7L2; TCFL5; TEAD1; TEAD2; TEAD3; TEAD4; TEF; TERB1; TERF1; TERF2; TET1; TET2; TET3; TFAP2A; TFAP2B; TFAP2C; TFAP2D; TFAP2E; TFAP4; TFCP2; TFCP2L1; TFDP1; TFDP2; TFDP3; TFE3; TFEB; TFEC; TGIF1; TGIF2; TGIF2LX; TGIF2LY; THAP1; THAP10; THAP11; THAP12; THAP2; THAP3; THAP4; THAP5; THAP6; THAP7; THAP8; THAP9; THRA; THRB; THYN1; TIGD1; TIGD2; TIGD3; TIGD4; TIGD5; TIGD6; TIGD7; TLX1; TLX2; TLX3; TMF1; TOPORS; TP53; TP63; TP73; TPRX1; TRAFD1; TRERF1; TRPS1; TSC22D1; TSHZ1; TSHZ2; TSHZ3; TTF1; TWIST1; TWIST2; UBP1; UNCX; USF1; USF2; USF3; VAX1; VAX2; VDR; VENTX; VEZF1; VSX1; VSX2; WIZ; WT1; XBP1; XPA; YBX1; YAP; YBX2; YBX3; YY1; YY2; ZBED1; ZBED2; ZBED3; ZBED4; ZBED5; ZBED6; ZBED9; ZBTB1; ZBTB10; ZBTB11; ZBTB12; ZBTB14; ZBTB16; ZBTB17; ZBTB18; ZBTB2; ZBTB20; ZBTB21; ZBTB22; ZBTB24; ZBTB25; ZBTB26; ZBTB3; ZBTB32; ZBTB33; ZBTB34; ZBTB37; ZBTB38; ZBTB39; ZBTB4; ZBTB40; ZBTB41; ZBTB42; ZBTB43; ZBTB44; ZBTB45; ZBTB46; ZBTB47; ZBTB48; ZBTB49; ZBTB5; ZBTB6; ZBTB7A; ZBTB7B; ZBTB7C; ZBTB8A; ZBTB8B; ZBTB9; ZC3H8; ZEB1; ZEB2; ZFAT; ZFHX2; ZFHX3; ZFHX4; ZFP1; ZFP14; ZFP2; ZFP28; ZFP3; ZFP30; ZFP37; ZFP41; ZFP42; ZFP57; ZFP62; ZFP64; ZFP69; ZFP69B; ZFP82; ZFP90; ZFP91; ZFP92; ZFPM1; ZFPM2; ZFX; ZFY; ZGLP1; ZGPAT; ZHX1; ZHX2; ZHX3; ZIC1; ZIC2; ZIC3; ZIC4; ZIC5; ZIK1; ZIM2; ZIM3; ZKSCAN1; ZKSCAN2; ZKSCAN3; ZKSCAN4; ZKSCAN5; ZKSCAN7; ZKSCAN8; ZMAT1; ZMAT4; ZNF10; ZNF100; ZNF101; ZNF107; ZNF112; ZNF114; ZNF117; ZNF12; ZNF121; ZNF124; ZNF131; ZNF132; ZNF133; ZNF134; ZNF135; ZNF136; ZNF138; ZNF14; ZNF140; ZNF141; ZNF142; ZNF143; ZNF146; ZNF148; ZNF154; ZNF155; ZNF157; ZNF16; ZNF160; ZNF165; ZNF169; ZNF17; ZNF174; ZNF175; ZNF177; ZNF18; ZNF180; ZNF181; ZNF182; ZNF184; ZNF189; ZNF19; ZNF195; ZNF197; ZNF2; ZNF20; ZNF200; ZNF202; ZNF205; ZNF207; ZNF208; ZNF211; ZNF212; ZNF213; ZNF214; ZNF215; ZNF217; ZNF219; ZNF22; ZNF221; ZNF222; ZNF223; ZNF224; ZNF225; ZNF226; ZNF227; ZNF229; ZNF23; ZNF230; ZNF232; ZNF233; ZNF234; ZNF235; ZNF236; ZNF239; ZNF24; ZNF248; ZNF25; ZNF250; ZNF251; ZNF253; ZNF254; ZNF256; ZNF257; ZNF26; ZNF260; ZNF263; ZNF264; ZNF266; ZNF267; ZNF268; ZNF273; ZNF274; ZNF275; ZNF276; ZNF277; ZNF28; ZNF280A; ZNF280B; ZNF280C; ZNF280D; ZNF281; ZNF282; ZNF283; ZNF284; ZNF285; ZNF286A; ZNF286B; ZNF287; ZNF292; ZNF296; ZNF3; ZNF30; ZNF300; ZNF302; ZNF304; ZNF311; ZNF316; ZNF317; ZNF318; ZNF319; ZNF32; ZNF320; ZNF322; ZNF324; ZNF324B; ZNF326; ZNF329; ZNF331; ZNF333; ZNF334; ZNF335; ZNF337; ZNF33A; ZNF33B; ZNF34; ZNF341; ZNF343; ZNF345; ZNF346; ZNF347; ZNF35; ZNF350; ZNF354A; ZNF354B; ZNF354C; ZNF358; ZNF362; ZNF365; ZNF366; ZNF367; ZNF37A; ZNF382; ZNF383; ZNF384; ZNF385A; ZNF385B; ZNF385C; ZNF385D; ZNF391; ZNF394; ZNF395; ZNF396; ZNF397; ZNF398; ZNF404; ZNF407; ZNF408; ZNF41; ZNF410; ZNF414; ZNF415; ZNF416; ZNF417; ZNF418; ZNF419; ZNF420; ZNF423; ZNF425; ZNF426; ZNF428; ZNF429; ZNF43; ZNF430; ZNF431; ZNF432; ZNF433; ZNF436; ZNF438; ZNF439; ZNF44; ZNF440; ZNF441; ZNF442; ZNF443; ZNF444; ZNF445; ZNF446; ZNF449; ZNF45; ZNF451; ZNF454; ZNF460; ZNF461; ZNF462; ZNF467; ZNF468; ZNF469; ZNF470; ZNF471; ZNF473; ZNF474; ZNF479; ZNF48; ZNF480; ZNF483; ZNF484; ZNF485; ZNF486; ZNF487; ZNF488; ZNF490; ZNF491; ZNF492; ZNF493; ZNF496; ZNF497; ZNF500; ZNF501; ZNF502; ZNF503; ZNF506; ZNF507; ZNF510; ZNF511; ZNF512; ZNF512B; ZNF513; ZNF514; ZNF516; ZNF517; ZNF518A; ZNF518B; ZNF519; ZNF521; ZNF524; ZNF525; ZNF526; ZNF527; ZNF528; ZNF529; ZNF530; ZNF532; ZNF534; ZNF536; ZNF540; ZNF541; ZNF543; ZNF544; ZNF546; ZNF547; ZNF548; ZNF549; ZNF550; ZNF551; ZNF552; ZNF554; ZNF555; ZNF556; ZNF557; ZNF558; ZNF559; ZNF560; ZNF561; ZNF562; ZNF563; ZNF564; ZNF565; ZNF566; ZNF567; ZNF568; ZNF569; ZNF57; ZNF570; ZNF571; ZNF572; ZNF573; ZNF574; ZNF575; ZNF576; ZNF577; ZNF578; ZNF579; ZNF580; ZNF581; ZNF582; ZNF583; ZNF584; ZNF585A; ZNF585B; ZNF586; ZNF587; ZNF587B; ZNF589; ZNF592; ZNF594; ZNF595; ZNF596; ZNF597; ZNF598; ZNF599; ZNF600; ZNF605; ZNF606; ZNF607; ZNF608; ZNF609; ZNF610; ZNF611; ZNF613; ZNF614; ZNF615; ZNF616; ZNF618; ZNF619; ZNF620; ZNF621; ZNF623; ZNF624; ZNF625; ZNF626; ZNF627; ZNF628; ZNF629; ZNF630; ZNF639; ZNF641; ZNF644; ZNF645; ZNF646; ZNF648; ZNF649; ZNF652; ZNF653; ZNF654; ZNF655; ZNF658; ZNF66; ZNF660; ZNF662; ZNF664; ZNF665; ZNF667; ZNF668; ZNF669; ZNF670; ZNF671; ZNF672; ZNF674; ZNF675; ZNF676; ZNF677; ZNF678; ZNF679; ZNF680; ZNF681; ZNF682; ZNF683; ZNF684; ZNF687; ZNF688; ZNF689; ZNF69; ZNF691; ZNF692; ZNF695; ZNF696; ZNF697; ZNF699; ZNF7; ZNF70; ZNF700; ZNF701; ZNF703; ZNF704; ZNF705A; ZNF705B; ZNF705D; ZNF705E; ZNF705G; ZNF706; ZNF707; ZNF708; ZNF709; ZNF71; ZNF710; ZNF711; ZNF713; ZNF714; ZNF716; ZNF717; ZNF718; ZNF721; ZNF724; ZNF726; ZNF727; ZNF728; ZNF729; ZNF730; ZNF732; ZNF735; ZNF736; ZNF737; ZNF74; ZNF740; ZNF746; ZNF747; ZNF749; ZNF750; ZNF75A; ZNF75D; ZNF76; ZNF761; ZNF763; ZNF764; ZNF765; ZNF766; ZNF768; ZNF77; ZNF770; ZNF771; ZNF772; ZNF773; ZNF774; ZNF775; ZNF776; ZNF777; ZNF778; ZNF780A; ZNF780B; ZNF781; ZNF782; ZNF783; ZNF784; ZNF785; ZNF786; ZNF787; ZNF788; ZNF789; ZNF79; ZNF790; ZNF791; ZNF792; ZNF793; ZNF799; ZNF8; ZNF80; ZNF800; ZNF804A; ZNF804B; ZNF805; ZNF808; ZNF81; ZNF813; ZNF814; ZNF816; ZNF821; ZNF823; ZNF827; ZNF829; ZNF83; ZNF830; ZNF831; ZNF835; ZNF836; ZNF837; ZNF84; ZNF841; ZNF843; ZNF844; ZNF845; ZNF846; ZNF85; ZNF850; ZNF852; ZNF853; ZNF860; ZNF865; ZNF878; ZNF879; ZNF880; ZNF883; ZNF888; ZNF891; ZNF90; ZNF91; ZNF92; ZNF93; ZNF98; ZNF99; ZSCAN1; ZSCAN10; ZSCAN12; ZSCAN16; ZSCAN18; ZSCAN2; ZSCAN20; ZSCAN21; ZSCAN22; ZSCAN23; ZSCAN25; ZSCAN26; ZSCAN29; ZSCAN30; ZSCAN31; ZSCAN32; ZSCAN4; ZSCAN5A; ZSCAN5B; ZSCAN5C; ZSCAN9; ZUFSP; ZXDA; ZXDB; ZXDC; or ZZZ3.

[0090] Accordingly, in embodiments, the transcription factor inhibitor (provided by the artificial nucleic acid of the invention) is for reducing or inhibiting the activity of a transcription factor selected from list A in a cell or subject.

[0091] In various embodiments, the transcription factor inhibitor (provided by the artificial nucleic acid of the invention) is for reducing or inhibiting the activity of a transcription factor selected from list A in a cell or subject, wherein the cellular transcription factor typically undergoes intracellular trafficking between the nucleus and cytoplasm. An example of such transcription factors are RUNX transcription factors or NF-kappaB.

[0092] Accordingly, in preferred embodiments, the target transcription factor is selected from AP1; ATF6; ERG; ETV1; GLI3; HOXA9; MBD2; MEF2A; NF-kappaB; POU3F2 (BRN2); PRDM13; RBPJ; RUNX1; RUNX2; SMAD3; SMAD4; SNAI1; TAZ; TCF21; TWIST1; MAML1; MAML2; EF2A; or YAP.

[0093] For example, overactivation or overexpression of ATF6 may be involved in fatty liver disease (Howarth et al., PLOS Genetics, 2014). Overactivation or overexpression of ERG and ETV1 may be involved in prostate cancer (Tomlin et al., Science, 2005). Overactivation or overexpression of GLI3 may be involved in corneal neovascularization (Renault et al., Circulation Research, 2008). Overactivation or overexpression of HOXA9 may be involved in myopia (Liang et al., BMC Ophthalmology, 2019). Overactivation or overexpression of MBD2 may be involved in diabetic retinopathy (Ge et al., Molecular Therapy: Nucleic Acids, 2021). Overactivation or overexpression of MEF2A may be involved in optic neuropathy (Xia et al., PLOS One, 2020). Overactivation or overexpression of Nf-KB may be involved in chronic tendon disease (Abraham et al., Science Translational Medicine, 2019). Overactivation or overexpression of BRN2 may be involved in melanoma, a common eye cancer (Goodall et al., MCB, 2004). Overactivation or overexpression of PRDM13 may be involved in North Carolina macular dystrophy (Small et al., Ophthalmology, 2016; Small et al., Molecular Vision 2021). Over activation or overexpression of RBPJ/Notch may be involved in hematologic cancer (Hurtado et al., Scientific Reports, 2019). Overactivation or overexpression of RUNX2 may be involved in osteoarthritis (Nishimura, J. Bone Metabolism, 2017). Overactivation or overexpression of SMAD3 may be involved in retinal detachment (Saik et al., Laboratory Investigation, 2004). Overactivation or overexpression of SMAD4 may be involved in proliferative vitreoretinopathy (Pao et al., PLOS One, 2021). Overactivation or overexpression of SNAI1 may be involved in ocular neovascularization (Sun et al., Angiogenesis, 2018). Overactivation or overexpression of YAP/TAZ may be involved in atherosclerosis (Wang et al., PNAS, 2016). Overactivation or overexpression of TCF21 may be involved in nephrotic syndrome (Usui, Scientific Reports, 2020). Overactivation or overexpression of Twist1 may be involved in lung cancer (Yochum, Oncogene, 2019). Overactivation or overexpression of YAP/TAZ may be involved atherosclerosis (Wang et al., PNAS, 2016). Overactivation or overexpression of API may be involved in TNFalpha mediated RUNX1 activation (Whitmore, FASEB journal: official publication of the Federation of American Societies for Experimental Biology. 2020). Overactivation or overexpression of RUNX1 may be involved in ocular diseases including proliferative vitreoretinopathy, diabetic retinopathy and in Down syndrome.

[0094] Accordingly, in preferred embodiments, the transcription factor inhibitor (provided by the artificial nucleic acid of the invention) is for reducing or inhibiting the activity AP1; ATF6; ERG; ETV1; GLI3; HOXA9; MBD2; MEF2A; NF-kappaB; POU3F2 (BRN2); PRDM13; RBPJ; RUNX1; RUNX2; SMAD3; SMAD4; SNAI1; TAZ; TCF21; TWIST1; MAML1; MAML2; EF2A; or YAP in a cell.

[0095] In preferred embodiments, the target transcription factor is selected from GLI3; HOXA9; MBD2; MEF2A; POU3F2 (BRN2); PRDM13; RUNX1; SMAD3; SMAD4; or SNAI1. These transcription factors are particularly suitable in embodiments where the target transcription factor is selected from a transcription factor that is overexpressed or overactive in an ocular disease, disorder, or condition (including aging). A preferred example is RUNX1 that is overexpressed or overactive in various ocular diseases including PVR.

[0096] Accordingly, in preferred embodiments, the transcription factor inhibitor (provided by the artificial nucleic acid of the invention) is for reducing or inhibiting the activity of GLI3; HOXA9; MBD2; MEF2A; POU3F2 (BRN2); PRDM13; RUNX1; SMAD3; SMAD4; or SNAI1 in a cell, preferably a cell of an eye.

[0097] In particularly preferred embodiments, the target transcription factor is a RUNX transcription factor, for example RUNX1, RUNX2, or RUNX3.

[0098] Accordingly, in particularly preferred embodiments, the transcription factor inhibitor (provided by the artificial nucleic acid of the invention) is for reducing or inhibiting the activity of a RUNX transcription factor, for example RUNX1, RUNX2, RUNX3, in a cell.

[0099] Runt-related transcription factor 1 (RUNX1), also known as acute myeloid leukaemia 1 protein (AML1) or core-binding factor subunit alpha-2 (CBFA2), is a protein that in humans is encoded by the RUNX1 gene. RUNX proteins (e.g. RUNX1, RUNX2, RUNX3) form a heterodimeric complex with core binding factor b (CBFbeta) which confers increased deoxyribonucleic acid (DNA) binding and stability to the complex. That complex comprising RUNX (CBFalpha) proteins and CBFbeta is often referred to as heterodimeric CBF transcription factor. RUNX1 is a transcription factor that inter alia regulates the differentiation of hematopoietic stem cells into mature blood cells. RUNX1 also plays a role in the development of the neurons that transmit pain. In humans, the RUNX1 gene is 260 kilobases (kb) in length and is located on chromosome 21 (21q22.12). The gene can be transcribed from 2 alternative promoters, promoter 1 (distal) or promoter 2 (proximal). As a result, various isoforms of RUNX1 can be synthesized, facilitated by alternative splicing. The full-length RUNX1 protein is encoded by 12 exons. Among the exons are two defined domains, namely the runt homology domain (RHD) or the runt domain (exons 2, 3 and 4), and the transactivation domain (TAD) (exon 6). These domains are necessary for RUNX1 to mediate DNA binding and protein-protein interactions respectively. The transcription of RUNX1 is regulated by 2 enhancers (regulatory element 1 and regulatory element 2), and these tissue specific enhancers enable the binding of lymphoid or erythroid regulatory proteins, therefore the gene activity of RUNX1 is highly active in the hematopoietic system.

[0100] An exemplary isoform of RUNX1 (Q01196-1; SEQ ID NO: 198) has 453 amino acids. As a transcription factor, its DNA binding ability is encoded by the runt domain (residues 50-177 of SEQ ID NO: 198. DNA recognition is achieved by loops of the 12-stranded b-barrel and the C-terminus “tail” (residues 170-177 of SEQ ID NO: 198), which clamp around the sugar phosphate backbone and fits into the major and minor grooves of DNA. Further exemplary landmark sequences and domains include residues 80-84 (DNA binding domain), residues 135-143 (DNA binding domain), residues 168-177 (DNA binding domain), residues 291-371 (interaction with K (lysine) acetyltransferase 6A (KATA6A)), residues 307-400 (interaction with K (lysine) acetyltransferase 6B (KATA6B)), and residues 362-402 (interaction with forkhead box P3 (FOXP3)). The nuclear localization signal (NLS) is present at amino acids 167 to 183 at the end of the Runt domain.

[0101] RUNX1 can bind DNA as a monomer, but its DNA binding affinity is enhanced by 10-fold if it heterodimerizes with its co-transcription factor CBFbeta, also via the runt domain.

[0102] An amino acid sequence for human RUNX1 is publicly available in the UniProt database under accession number Q01196-1 (or SEQ ID NO: 198). Amino acid sequences of additional isoforms are publicly available in the UniProt database under accession numbers Q01196-2; Q01196-3; Q01196-4; Q01196-5; Q01196-6; Q01196-7; Q01196-8; Q01196-9; Q01196-10; and Q01196-11 (see also SEQ ID NOs: 199-212)

[0103] Runt-related transcription factor 2 (RUNX2), also known as core-binding factor subunit alpha-1, is a protein that in humans is encoded by the RUNX2 gene. RUNX2 is a transcription factor that inter alia has been associated with osteoblast differentiation. An amino acid sequence for human RUNX2 is publicly available in the GenBank database under accession number NP_001019801.3 (see also SEQ ID NO: 23 of published patent application WO2019099560). Exemplary landmark sequences and domains include residues 49-71 (polyglutamine repeat), residues 73-89 (polyalanine repeat), residues 109-230 (runt domain), residues 242-258 (domain for interaction with forkhead Box 01 (FOXOI)), residues 336-439 (domain for interaction with K (lysine) acetyltransferase 6A (KATA6A)), residues 374-488 (domain for interaction with K (lysine) acetyltransferase 6B (KATA6B)), and residues 430-521 (RUNX1 inhibition domain). Additional amino acid sequences of human RUNX2 isoforms are public ally available in the GenBank database under accession numbers: NP_001015051.3, Q13950.2, and NP_001265407.1. Amino acid sequences of additional RUNX2 isoforms are publicly available in the GenBank database under accession numbers NP_001139392.1, NP_001139510.1, NP_001258556.1, NP_001258559.1, and NP_001258560.1.

[0104] In particularly preferred embodiments, the target transcription factor is RUNX1.

[0105] Accordingly, in preferred embodiments, the artificial nucleic acid of the invention comprises at least one coding sequence encoding at least one RUNX1 transcription factor inhibitor (e.g. a RUNX1 trap) for reducing or inhibiting the activity of a RUNX1 in a cell.

### Amino Acid Sequences—Element A

[0106] In preferred embodiments, the encoded transcription factor inhibitor comprises at least one amino acid sequence element A that is configured to bind to the cellular target transcription factor or its transcription co-factor.

[0107] Accordingly, amino acid sequence element A of the encoded transcription factor inhibitor is configured to bind to the target transcription factor (e.g. RUNX) or its transcription co-factor (e.g. CBFbeta).

[0108] In embodiments where amino acid sequence element A is configured to bind to the (cellular) target transcription factor, the produced transcription factor inhibitor (comprising such an element A) binds to its target transcription factor (e.g. RUNX), thereby directly reducing or inhibiting the activity of a target transcription factor in a cell (e.g. RUNX).

[0109] In embodiments where amino acid sequence element A is configured to bind to a (cellular) transcription co-factor of the target transcription factor, the produced transcription factor inhibitor (comprising such an element A) binds to the transcription co-factor (e.g. CBFbeta) of the target transcription factor, thereby indirectly reducing or inhibiting the activity of the target transcription factor in a cell (e.g. RUNX).

[0110] In various embodiments, the amino acid sequence element A comprises any amino acid sequence that has binding affinity to the (cellular) target transcription factor or its transcription co-factor.

[0111] In preferred embodiments, the encoded transcription factor inhibitor comprises at least one amino acid sequence element A that comprises or consists of an amino acid sequence selected or derived from the target transcription factor, an interaction partner of the target transcription factor, a binding partner of the target transcription factor, a transcription co-factor of the target transcription factor, an antibody moiety, an intrabody moiety, a peptide-based aptamer, or a fragment or variant of any of these that preferably binds to the target transcription factor or its transcription co-factor.

[0112] In some embodiments, the at least one amino acid sequence element A does not comprise an amino acid sequence selected or derived from an antibody moiety or an intrabody moiety.

[0113] In various preferred embodiments, the at least one amino acid sequence element A comprises or consists of an amino acid sequence that lacks a nuclear localization signal (NLS) or that has been modified to lack an NLS. The absence of an NLS in the transcription factor inhibitor of the present invention is particularly important in embodiments where the transcription factor inhibitor is a transcription factor trap as defined herein. Accordingly, the at least one amino acid sequence element A may be selected from a protein that naturally lacks an NLS, e.g. a transcription co-factor of the target transcription factor that lacks an NLS (e.g. CBFbeta). Alternatively, the at least one amino acid sequence element A may be selected from a protein that naturally comprises an NLS, wherein the amino acid sequence has been modified to lack a functional NLS e.g. by removing or mutating the respective amino acid sequence of element A (e.g. a modified RUNX amino acid sequence).

[0114] In various preferred embodiments, the at least one amino acid sequence element A comprises or consists of an amino acid sequence that lacks a DNA binding domain or that has been modified to lack a functional DNA binding domain.

[0115] Accordingly, the at least one amino acid sequence element A may be selected from a protein that naturally lacks a DNA binding domain, e.g. a transcription co-factor of the target transcription factor that lacks an DNA binding domain (e.g. CBFbeta). Alternatively, the at least one amino acid sequence element A may be selected from a protein that naturally comprises a DNA binding domain, wherein the amino acid sequence has been modified to lack a functional DNA binding domain e.g. by removing or mutating the respective amino acid sequence of element A (e.g. a modified RUNX amino acid sequence).

[0116] In preferred embodiments, the at least one amino acid sequence element A is configured to bind to the target transcription factor. Accordingly, in preferred embodiments, the at least one amino acid sequence element A comprises or consists of an amino acid sequence selected or derived from a transcription co-factor of the target transcription factor, or a fragment or variant thereof.

[0117] Selecting the amino acid sequence element A from a transcription co-factor of the target transcription factor is particularly suitable in the context of the present invention. Preferably, amino acid sequence element A is selected or derived from a transcription co-factor that binds directly to the target transcription factor. Preferably, amino acid sequence element A is selected or derived from a transcription co-factor that forms a heterodimeric complex with the target transcription factor, preferably in the cytosol.

[0118] Accordingly, in preferred embodiments, the at least one amino acid sequence element A comprises or consists of an amino acid sequence selected or derived from a transcription co-factor of the target transcription factor, or a fragment or variant thereof, wherein the transcription co-factor is selected from a co-factor that forms a heterodimeric complex with the transcription factor, preferably in the cytosol.

[0119] Suitably, the transcription co-factor is selected from a co-factor of any of the target transcription factors of list A, preferably selected from a transcription co-factor of a target transcription factor selected from AP1; ATF6; ERG; ETV1; GLI3; HOXA9; MBD2; MEF2A; NF-kappaB; POU3F2 (BRN2); PRDM13; RBPJ; RUNX1; RUNX2; SMAD3; SMAD4; SNAI1; TAZ; TCF21; TWIST1; MAML1; MAML2; EF2A; or YAP. More preferably, the transcription co-factor is selected from a co-factor of a target transcription factor selected from GLI3; HOXA9; MBD2; MEF2A; POU3F2 (BRN2); PRDM13; SMAD3; SMAD4; SNAI1; or RUNX, e.g. RUNX1.

[0120] The skilled person is able to identify transcription co-factors for respective target transcription factors, to obtain suitable amino acid sequences from those transcription co-factors suitable for binding to the target transcription factor, and to include said suitable amino acid sequence into an amino acid sequence of respective transcription factor inhibitor. For example, suitable transcription co-factors may be selected from PBX3 (co-factor of the target transcription factor HOXA9), HDAC9 or p300 (co-factors of the target transcription factor MEF2), PAX3, SOX10, and OCT1 (co-factors of the target transcription factor BRN2), Smad-binding proteins (co-factors of target transcription factors SMAD3 or SMAD4), LMO4 (co-factors of target transcription factor SNAI1), MAML (co-factor of RBPJ), or CBFbeta (co-factor of RUNX target transcription factors).

[0121] In preferred embodiments, the at least one amino acid sequence element A comprises or consists of an amino acid sequence selected or derived from a transcription co-factor of a Runt-related transcription factor (e.g. RUNX1, RUNX2, RUNX3), preferably RUNX1, or a fragment or variant thereof.

[0122] Preferably, the transcription co-factor of Runt-related transcription factor (e.g. RUNX1, RUNX2, RUNX3), preferably RUNX1, is selected or derived from a co-factor that forms a heterodimeric complex with a Runt-related transcription factor (e.g. RUNX1, RUNX2, RUNX3), preferably RUNX1 in the cytosol.

[0123] In preferred embodiments, the transcription co-factor of RUNX is selected or derived from Core Binding Factor beta (CBFbeta), for example CBFbeta1 or CBFbeta2 isoforms, or a fragment or variant thereof.

[0124] Accordingly, the transcription factor inhibitor, preferably the RUNX inhibitor, comprises at least one amino acid sequence element A selected or derived from a transcription co-factor of RUNX, wherein the transcription co-factor of RUNX is selected or derived from CBFbeta, or a fragment or variant thereof.

[0125] The transcription co-factor CBFbeta is a subunit of a heterodimeric core-binding transcription factor belonging to the PEBP2/CBF transcription factor family which regulates a host of genes specific to haematopoiesis (e.g., RUNX1) and osteogenesis (e.g., RUNX2). The Core Binding Factor (CBF) regulates transcription via formation of a heterodimeric complex between RUNX, the CBFalpha-DNA-binding subunit, and CBFbeta. CBFbeta is a non-DNA binding regulatory subunit; it allosterically enhances DNA binding by the alpha subunit (of e.g. RUNX) as the complex binds to the core site of various enhancers and promoters. Despite that RUNX can bind DNA as a monomer in vitro, heterodimerization with the non-DNA binding transcription co-factor CBFbeta triggers flexible DNA-recognition loops, thus stabilizing the complex and increasing RUNX binding to DNA. Binding of transcription co-factor CBFbeta enhances DNA binding affinity of RUNX by approximately 10-fold.

[0126] There are two different described isoforms of CBFbeta proteins. The CBFbeta isoform 1 (UniProt database entry Q13951-1; SEQ ID NO: 178) has 182 amino acids, and the CBFbeta isoform 2 (UniProt database entry Q13951-2; SEQ ID NO: 181) has 187 amino acids. The amino acid 165 to 166 represent a splice site that leads to the formation of the two different isoforms of CBFbeta with either 17 (CBFbeta2) or 22 (CBFbeta1) distinct amino acid sequences. CBFbeta isoform 1 and CBFbeta isoform 2 are highly similar wherein amino acid 1 to 165 are identical and the C-terminus region varies between the two isoforms. The amino acid sequence elements responsible for heterodimerization with RUNX1 or RUNX2 is located in amino acid sequence 1 to 141 (see SEQ ID NO: 182) in both isoforms. Other isoforms are provided and can be derived from SEQ ID NOs: 179 and 180.

[0127] In preferred embodiments, element A comprises an amino acid sequence selected or derived from CBFbeta, preferably wherein the CBFbeta amino acid sequence is an N-terminal fragment of a human CBFbeta. In embodiments, the N-terminal fragment of a human CBFbeta comprises an N-terminal stretch from position 1 to position 100, position 1 to position 110, position 1 to position 115, position 1 to position 120, position 1 to position 125, position 1 to position 130, position 1 to position 135, position 1 to position 140, position 1 to position 145, position 1 to position 150, position 1 to position 165, position 1 to position 170, position 1 to position 175, or position 1 to position 180 of amino acid sequence SEQ ID NO: 178. In embodiments, the N-terminal fragment of a human CBFbeta comprises an N-terminal stretch from position 5 to position 100, position 5 to position 110, position 5 to position 115, position 5 to position 120, position 5 to position 125, position 5 to position 130, position 5 to position 135, position 5 to position 140, position 5 to position 145, position 5 to position 150, position 5 to position 165, position 5 to position 170, position 5 to position 175, or position 5 to position 180 of amino acid sequence SEQ ID NO: 178. In embodiments, the N-terminal fragment of a human CBFbeta comprises an N-terminal stretch from position 10 to position 100, position 10 to position 110, position 10 to position 115, position 10 to position 120, position 10 to position 125, position 10 to position 130, position 10 to position 135, position 10 to position 140, position 10 to position 145, position 10 to position 150, position 10 to position 165, position 10 to position 170, position 10 to position 175, or position 10 to position 180 of amino acid sequence SEQ ID NO: 178. In embodiments, the N-terminal fragment of a human CBFbeta comprises an N-terminal stretch from position 20 to position 100, position 20 to position 110, position 20 to position 115, position 20 to position 120, position 20 to position 125, position 20 to position 130, position 20 to position 135, position 20 to position 140, position 20 to position 145, position 20 to position 150, position 20 to position 165, position 20 to position 170, position 20 to position 175, or position 20 to position 180 of amino acid sequence SEQ ID NO: 178.

[0128] In embodiments, the N-terminal fragment of a human CBFbeta comprises an N-terminal stretch comprising at least 100, 110, 120, 130, 140, 150, or 160 amino acid residues of amino acid sequence SEQ ID NO: 178, e.g. 130, 141 or 165 amino acid residues of SEQ ID 178.

[0129] In preferred embodiments, element A comprises an amino acid sequence selected or derived from CBFbeta, wherein the CBFbeta amino acid sequence is an N-terminal fragment of a human CBFbeta, preferably comprising up to about 130, preferably comprising up to about 141, more preferably up to about 165 amino acids residues of amino acid sequence SEQ ID NO: 178.

[0130] In preferred embodiments, the CBFbeta amino acid sequence is selected or derived from a fragment comprising amino acid 1 to amino acid 130 of CBFbeta of amino acid sequence SEQ ID NO: 178. In other preferred embodiments, the CBFbeta amino acid sequence is selected or derived from a fragment comprising amino acid 1 to amino acid 141 of CBFbeta of amino acid sequence SEQ ID NO: 178, for example CBFbeta (1-141) according to SEQ ID NO: 182. In particularly preferred embodiments, the CBFbeta amino acid sequence is selected or derived from a fragment comprising amino acid 1 to amino acid 165 of CBFbeta of amino acid sequence SEQ ID NO: 178, for example CBFbeta (1-165) according to SEQ ID NO: 183.

[0131] In preferred embodiments, the transcription factor inhibitor (that is provided by the artificial nucleic acid of the invention) comprises at least one amino acid sequence element A that comprises or consists of an amino acid sequence selected or derived from CBFbeta being identical or at least 70%, 80%, 85%, 86%, 87%, 88%, 89%, 90%, 91%, 92%, 93%, 94%, 95%, 96%, 97%, 98%, or 99% identical to any one of SEQ ID NOs: 178-183, or fragments or variants of any of these. Suitable amino acid sequences are also provided in Table 1.

[0132] In particularly preferred embodiments, the transcription factor inhibitor (that is provided by the artificial nucleic acid of the invention) comprises at least one amino acid sequence element A that comprises or consists of an amino acid sequence selected or derived from CBFbeta being identical or at least 90%, 91%, 92%, 93%, 94%, 95%, 96%, 97%, 98%, or 99% identical to any one of SEQ ID NO: 183, or a fragment or variant thereof.

[0133] In other preferred embodiments, the at least one amino acid sequence element A is configured to bind to a (cellular) transcription co-factor of the target transcription factor. In preferred embodiments, the transcription co-factor of the target transcription factor is selected from a co-factor protein, a chromatin factor, or a non-coding regulatory nucleic acid.

[0134] In particularly preferred embodiments, the at least one amino acid sequence element A is configured to bind to a transcription co-factor protein of the target transcription factor, suitably a transcription co-activator.

[0135] In preferred embodiments, the at least one amino acid sequence element A comprises or consists of an amino acid sequence selected or derived from the target transcription factor, or a fragment or variant thereof.

[0136] Suitably, the amino acid sequence element A may be selected or derived from any target transcription factors of list A, preferably selected or derived from AP1; ATF6; ERG; ETV1; GLI3; HOXA9; MBD2; MEF2A; NF-kappaB; POU3F2 (BRN2); PRDM13; RBPJ; RUNX1; RUNX2; SMAD3; SMAD4; SNAI1; TAZ; TCF21; TWIST1; or YAP, or fragments or variants of any of these. More preferably, the amino acid sequence element A is selected or derived from GLI3; HOXA9; MBD2; MEF2A; POU3F2 (BRN2); PRDM13; SMAD3; SMAD4; SNAI1; or RUNX1, or fragments or variants of any of these.

[0137] In preferred embodiments, the at least one element A comprises or consists of an amino acid sequence selected or derived from RUNX or a fragment or variant thereof, preferably wherein the RUNX amino acid sequence is an N-terminal fragment of a human RUNX1. A preferred N-terminal fragment of a human RUNX comprises the Runt homology domain (RHD).

[0138] Accordingly, in preferred embodiments, the N-terminal fragment of RUNX comprises residues 1 to 128 selected or derived from RUNX1, residues 1 to 177 selected or derived from RUNX1, or residues 1 to 241 selected or derived from RUNX1 (positions according to SEQ ID NO: 198). For example, for example the RUNX1 that comprises residues 1 to 128 may comprise an amino acid sequence according to SEQ ID NO: 213. For example, for example the RUNX1 that comprises residues 1 to 177 may comprise an amino acid sequence according to SEQ ID NO: 214. For example, for example the RUNX1 that comprises residues 1 to 241 may comprise an amino acid sequence according to SEQ ID NO: 215.

[0139] In preferred embodiments, the amino acid sequence element A selected or derived from the target transcription factor comprises at least one amino acid substitution or deletion that reduces or prevents binding to its target DNA or at least one amino acid substitution or deletion that reduces or prevents nuclear translocation and/or at least one amino acid substitution or deletion that reduces or prevents homodimerization or heterodimerization.

[0140] In preferred embodiments, the amino acid sequence is selected or derived from the target transcription factor RUNX, preferably RUNX1, wherein the amino acid sequence comprises at least one amino acid substitution or deletion that reduces or prevents binding to its target DNA or at least one amino acid substitution and/or a deletion that reduces or prevents nuclear translocation.

[0141] Suitably, the amino acid substitution or deletion that reduces or prevents binding of the RUNX1 amino acid sequence to its target DNA may be located in any of residues 80-84, 135-143, or 168-177 (positions according to the RUNX1 sequence according to SEQ ID NO: 198). Preferably, a substitution or deletion is introduced at position R80, K83, K83, R135, R139, R142, K167, T169, D171, R174, or R177.

[0142] Suitably, the amino acid substitution or deletion that reduces or prevents nuclear translocation of the RUNX1 amino acid sequence may be located in any of residues 167 to 183 (positions according to the RUNX1 sequence according to SEQ ID NO: 198). Preferably, a substitution or deletion is introduced at position K167, T169, D171, R174, or R177.

[0143] In preferred embodiments, the at least one amino acid sequence element A comprises or consists of an amino acid sequence selected or derived from RUNX1 or a fragment or variant thereof, wherein the RUNX1 amino acid sequence comprises at least one, two, or more amino acid substitutions or deletions selected from R80A, K83A, K83E, R135A, R139A, R142A, K167A, T169A, D171A, R174A, or R177A, or any functionally equivalent amino acid substitution at position R80, K83, R135, R139, R142, K167, T169, D171, R174, or R177.

[0144] In preferred embodiments, at least one amino acid substitution in the RUNX1 amino acid sequence is selected from R174Q and/or K83E, or any functionally equivalent amino acid substitution at position R174 and/or K83. Suitably, the amino acid substitutions are selected from R174Q and K83E, for example wherein the RUNX1 comprises an amino acid sequence according to SEQ ID NO: 197, or a fragment or variant thereof.

[0145] In preferred embodiments, the transcription factor inhibitor comprises at least one amino acid sequence element A that comprises or consists of an amino acid sequence selected or derived from RUNX1 being identical or at least 70%, 80%, 85%, 86%, 87%, 88%, 89%, 90%, 91%, 92%, 93%, 94%, 95%, 96%, 97%, 98%, or 99% identical to any one of SEQ ID NOs: 197-215, or fragments or variants of any of these. Suitable amino acid sequences are also provided in Table 1.

[0146] In particularly preferred embodiments, the transcription factor inhibitor comprises at least one amino acid sequence element A that comprises or consists of an amino acid sequence selected or derived from RUNX1 fragment being identical or at least 90%, 91%, 92%, 93%, 94%, 95%, 96%, 97%, 98%, or 99% identical to any one of SEQ ID NOs: 213 or 214, or fragments or variants of any of these.

[0147] In particularly preferred embodiments, the transcription factor inhibitor comprises at least one amino acid sequence element A that comprises or consists of an amino acid sequence selected or derived from RUNX1 (K83E,R174Q) being identical or at least 90%, 91%, 92%, 93%, 94%, 95%, 96%, 97%, 98%, or 99% identical to any one of SEQ ID NO: 197, or fragments or variants of any of these.

### Amino Acid Sequences—Element B

[0148] According to preferred embodiments, the transcription factor inhibitor that is encoded by the artificial nucleic acid of the invention comprises at least one amino acid sequence element B.

[0149] Notably, amino acid sequence element A and amino acid sequence element B may represent a different amino acid sequence, or amino acid sequence element A and amino acid sequence element B may represent (partially) overlapping amino acid sequences, or amino acid sequence element A and amino acid sequence element B may represent (essentially) the same amino acid sequence.

[0150] In preferred embodiments, amino acid sequence element A and amino acid sequence element B of the transcription factor inhibitor represent different amino acid sequences, e.g. element A and element B are located at different positions in the amino acid sequence of the transcription factor inhibitor.

[0151] In preferred embodiments, the encoded transcription factor inhibitor comprises at least one amino acid sequence element B that is configured to prevent or reduce the interaction of the cellular target transcription factor with its target DNA. Accordingly, the amino acid sequence element B is selected or derived from a peptide or protein (e.g. a certain protein domain) that prevents or reduces the interaction of the target transcription factor with its target DNA.

[0152] In preferred embodiments, the encoded transcription factor inhibitor comprises at least one amino acid sequence element B that is configured to prevent or reduce interaction of the cellular target transcription factor with at least one cellular transcription co-factor of the target transcription factor. Accordingly, the amino acid sequence element B is selected or derived from a peptide or protein (e.g. a certain protein domain) that prevents or reduces interaction of the target transcription factor with at least one co-factor of the target transcription factor.

[0153] In preferred embodiments, the encoded transcription factor inhibitor comprises at least one amino acid sequence element B that is configured to prevent or reduce nuclear translocation of the (cellular) target transcription factor. Accordingly, the amino acid sequence element B is selected or derived from a peptide or protein (e.g. a certain protein domain) that prevents or reduces nuclear translocation of the target transcription factor.

[0154] In preferred embodiments, the encoded transcription factor inhibitor comprises at least one amino acid sequence element B that is configured to bind the cellular target transcription factor or its transcription co-factor preferably in the cytosol. Accordingly, the amino acid sequence element B is selected or derived from a peptide or protein (e.g. a certain protein domain) that binds the target transcription factor or its transcription co-factor preferably in the cytosol.

[0155] In preferred embodiments, the encoded transcription factor inhibitor comprises at least one amino acid sequence element B that is configured to repress the transcription activity of the cellular target transcription factor. Accordingly, the amino acid sequence element B is selected or derived from a peptide or protein (e.g. a certain protein domain) that represses the transcription activity of the target transcription factor.

[0156] In particularly preferred embodiments, the encoded transcription factor inhibitor comprises at least one amino acid sequence element B that is configured to prevent or reduce the interaction of the target transcription factor with its target DNA and that is configured to prevent or reduce interaction of the target transcription factor with at least one co-factor of the target transcription factor and is configured to prevent or reduce nuclear translocation of the cellular target transcription factor and is configured to bind the cellular target transcription factor in the cytosol and is optionally configured to repress the transcription activity of the cellular target transcription factor

[0157] In particularly preferred embodiments, the transcription factor inhibitor that is encoded by the artificial nucleic acid of the invention comprises at least one amino acid sequence element B that comprises or consists of an amino acid sequence selected or derived from a cytoplasmic protein or a protein that is associated with or binds to a cytoplasmic protein, or a fragment or variant thereof.

[0158] A cytoplasmic protein has to be understood as a protein that is typically located in the cytoplasm of a cell. Proteins that undergo nucleocytoplasmic transport (e.g. via NLS signals) are not considered to be a cytoplasmic protein. Proteins that undergo secretion (e.g. via secretory signal peptides) are not considered to be a cytoplasmic protein.

[0159] The suitable cytoplasmic protein in the context of the invention can also be a synthetic, engineered, or heterologous protein. A typical cytoplasmic protein is a cytoskeletal protein or a protein that is associated with a cytoskeletal protein (e.g. a peptide or protein that binds to the cytoskeleton of a cell, e.g. an actin-binding protein).

[0160] In preferred embodiments, amino acid sequence element B comprises or consists of an amino acid sequence selected or derived from a cytoskeletal protein or a protein that is associated with or binds to a cytoskeletal protein, or a fragment or variant of any of these. Such proteins are particularly suitable as the transcription factor inhibitor of the invention that e.g. binds to a cellular transcription factor (e.g. RUNX via a CBFbeta amino acid sequence element A) such that it can be trapped in the cytosol via an amino acid sequence that optionally interacts with or binds to a cytoskeletal protein (e.g. an actin binding protein) or a protein in the cytosol.

[0161] In preferred embodiments in that context, the cytoplasmic protein, preferably the cytoskeletal protein is selected or derived from myofibrillar protein (e.g. actin or myosin), a microtubule protein, an intermediate filament protein, or a fragment or variant of any of these. Particularly suitable in that context is myosin.

[0162] In preferred embodiments in that context, the cytoplasmic protein, preferably the cytoskeletal protein is selected or derived from a peptide or protein that is associated with or binds to a myofibrillar protein (e.g. actin), a microtubule protein, an intermediate filament protein, or a fragment or variant of any of these. Particularly suitable in that context are actin-binding peptides or proteins.

[0163] Accordingly, it is preferred in the context of the invention that amino acid sequence element B comprises or consists of an amino acid sequence selected or derived from a protein that comprises a myofibrillar binding domain, in particular an actin binding domain, a microtubule binding domain, an intermediate filament binding domain, or a fragment or variant of any of these that comprises a myofibrillar binding domain.

[0164] In particularly preferred embodiments, amino acid sequence element B comprises or consists of an amino acid sequence selected or derived from a protein that comprises an actin binding domain, or a fragment or variant of any of these that comprises an actin binding domain.

[0165] In various preferred embodiments, the amino acid sequence element B comprises or consists of an amino acid sequence selected or derived from a cytoskeletal protein, preferably a protein that comprises an actin binding domain, wherein the amino acid sequence is selected from any one of the proteins provided in List B: 25 kDa ABP from aorta p185neu; 30 akDA 110 kD dimer ABP; 30 bkDa 110 kD (Drebrin); p53; p58gag; p116rip; a-actinin; Abl; AbLIM Actin-Interacting MAPKKK; ABP120; ABP140; Abp1p; ABP280 (Filamin); ABP50 (EF-1a); Acan 125 (Carmil); ActA; Actibind; Actin; Actinfilin; Actinogelin; Actin-regulating kinases; Actin-Related Proteins; Actobindin; Actolinkin; Actopaxin; Actophorin; Acumentin (=L-plastin); Adducin; ADF/Cofilin; Adseverin (scinderin); Afadin; AFAP-110; Affixin; Aginactin; AIP1; Aldolase; Angiogenin; Anillin; Annexins; Aplyronine; Archvillin; Arginine kinase; Arp2/3 complex; Band 4.1; Band 4.9 (Dematin); b-actinin; b-Cap73; Bifocal; Bistramide A; BPAG1; Brevin (Gelsolin); c-Abl; Calpactin (Annexin); CHO1; Cortactin; CamKinase Il; Calponin; Chondramide; Cortexillin; CAP; Caltropin; CH-ILKBP; CPb3; Cap100; Calvasculin; Ciboulot; Coactosin; CAP23; CARMIL; Acan125; Cingulin; Cytovillin (Ezrin); CapZ/Capping Protein; a-Catenin; Cofilin; CR16; Caldesmon; CCT; Comitin; Calicin; Centuarin; Coronin; DBP40; Drebrin; Dematin (Band 4.9); Dynacortin; Destrin (ADF/cofilin); Dystonins; Diaphanous; Dystroglycan; DNase I; Dystrophin; Doliculide; Dolastatins; EAST; Endossin; EF-1a (ABP50); Eps15; EF-1b; EPLIN; EF-2; Epsin; EGF receptor; ERK; ERZ; ENC-1; ERM proteins (ezrin, radixin, moesin, plus merlin); END3p; Ezrin (the E of ERM protein family); F17R; Fodrin (spectrin); Fascin; Formins; Fessilin; Frabin; FHL3; Fragmin; Fhos; FLNA (filamin A); Fimbrin (plastin); GAP43; Glycogenins; Gas2; G-proteins; Gastrin-Binding Protein; Gelactins I-IV; Gelsolins; Glucokinase; Harmonin b; Hrp36; Hexokinase; Hrp65-2; Hectochlorin; HS1 (actin binding protein); Helicase II; Hsp27; HIP1 (Huntingtin Interacting protein 1); Hsp70; Histactophilin; Hsp90; Histidine rich protein II; Hsp100; Inhibitor of apoptosis (IAP); Insertin; Interaptin; IP3Kinase A (Inositol 1,4,5-trisphosphate 3-kinase A); IQGAP; Integrins; Jaspisamide A; Jasplakinolide; Kabiramide C; Kaptin; Kettin; Kelch protein; keratin (e.g. kreatin-19); 5-Lipoxygenase; Limatin; Lim Kinases; Lim Proteins; L-plastin; Lymphocyte Specific Protein 1 (LSP1); MACF1 [3]; MacMARKS; Mena; Myopodin; MAP1A; Microtubule Associated Protein 7 (MAP7); Merlin (related to the ERM proteins); Myosins (e.g. SMMHC); MAP-1C; Metavinculin; Moesin (the M of ERM proteins); Myosin light chain kinase; MAL; Mip-90; Myosin Light Chain A1; MARKS; MIM; MAYP; Mycalolide (a macroglide drug); Mayven; Myelin basic protein; Naphthylphthalamic acid binding protein (NPA)N-RAP; Nebulin; N-WASP; Neurabin; Nullo; Neurexins; Neurocalcin; Nexillin; OYE2; Palladin; Plastin; p30; PAK (p21-activated Kinase); Plectin; p47PHOX; Parvin (actopaxin); Prefoldin; p53; PASK (Proline, Alanine rich Ste20 related Kinase); Presenilin I; p58; Phalloidin (not a protein; a small cyclic peptide); Profilin; p185neu; Ponticulin; Protein kinase C; Porin; P.IB; Prk1p (actin regulating kinase); Radixin (the R of ERM proteins); Rapsyn; Rhizopodin; RPL45; RTX toxin (Vibrio cholerae); RVS 167; Sac6; Sla1p; Srv2 (CAP); S-adenosyl-L-homocysteine hydrolase, (SAHH); Sla2p; Synaptopodin; Scinderin (adseverin); Synapsins; Scruin; Spectrin; Severin; Spectraplakins; SVSII; Shot (Short stop); Spire; Shroom; Smitin (Smooth Musc.Titin); Supervillin; SipA; Smoothelin; Sucrose synthetase; SipC; Sra-1; Spinophilin; Ssk2p; Swinholide; Talin protein; Toxophilin; Twinfilin; Tau; Trabeculin; Twinstar; TCP-1; Transgelin; Transgelin 2; Transgelin 3; Tensin; Tropomodulin; Thymosin; Tropomyosin; Titin; Troponin; TOR2; Tubulin bIV; Ulapualide; Utrophin; Unc-87; Unc-60 (ADF/cofilins); VASP; Vav; Verprolin; VDAC; Vibrio cholerae RTX toxin; Villin; Vinculin; VIM (Vimentin); Vitamin D-binding protein; WIP; WASp; Y-box proteins; YpkA (YopO); Zipper protein; Zo-1; or Zyxin.

[0166] Suitably, the amino acid sequence of element B is selected from or derived from a protein of List B, preferably selected from or derived from an actin binding domain of any of the proteins of List B.

[0167] In preferred embodiments, the amino acid sequence element B is selected from a myofibrillar protein. A typical myofibrillar protein may be selected from actin or myosin. Suitably, the myosin is selected from a myosin heavy chain or a myosin light chain.

[0168] A particularly preferred cytoplasmic peptide or protein, in particular cytoskeletal protein, is smooth muscle myosin heavy chain (SMMHC), or a fragment or variant of SMMHC that binds to a cytoskeletal protein (e.g., actin).

[0169] The cytoskeletal protein smooth muscle myosin heavy chain (SMMHC, Myosin-11, MYH11) is a protein belonging to the myosin heavy chain family. SMMHC is an actin binding protein. SMMHC is a subunit of a hexameric protein that consists of two heavy chain subunits and two pairs of non-identical light chain subunits. There are four different isoforms of SMMHC proteins. The SMMHC isoform 1 (UniProt database entry P35749-1; SEQ ID NO: 184) has a length of 1972 amino acid residues, and three further isoforms (P35749-2, P35749-3, P35749-4; SEQ ID NOs: 185-187).

[0170] In the context of the invention, an important amino acid region of the SMMHC protein represent the high affinity binding domain (HABD; position 1539 to 1592 in relation to SEQ ID NO: 184). HABD is a protein domain that may promote a stronger binding to the target transcription factor (e.g. RUNX) which may be important for a dominant negative effect of the encoded transcription factor inhibitor as the HABD may outcompete the interaction of transcriptional co-factors (e.g. CBFbeta). A further important amino acid region of the SMMHC protein represent the Assembly competence domain (ACD; position 1876 to 1903 in relation to SEQ ID NO: 184). ACD is a protein domain that may allows for a self-dimerization of the transcription factor inhibitor (carrying such a sequence). A further important amino acid region of the SMMHC protein represents a transcriptional repression domain (TRD; position 1809 to 1877 in relation to SEQ ID NO: 184). TRD is a protein domain that may further repress the activity of the target transcription factor.

[0171] Accordingly, in preferred embodiments, the amino acid sequence selected or derived from SMMHC comprises at least one of a high-affinity binding domain (HABD) and/or an assembly competent domain (ACD) and/or a transcriptional repression domain (TRD), or a fragment or variant of any of these. In the context of RUNX inhibitors, it may be suitable that amino acid sequence element B comprises HABD as that domain may increase the affinity for the target transcription factor RUNX and as that domain may lead to a binding of twice as many cellular RUNX molecules compared to cellular CBFbeta.

[0172] In preferred embodiments, the SMMHC amino acid sequence selected for element B is derived or selected from a C-terminal fragment of a human SMMHC (that is, it lacks the N-terminal part).

[0173] In preferred embodiments, element B comprises an amino acid sequence selected or derived from SMMHC, preferably wherein the SMMHC amino acid sequence is a C-terminal fragment of a human SMMHC. In embodiments, the C-terminal fragment of a human SMMHC comprises a C-terminal stretch from position 1000 to position 1972, position 1100 to position 1972, position 1200 to position 1972, position 1300 to position 1972, position 1400 to position 1972, position 1500 to position 1972, position 1550 to position 1972, position 1600 to position 1972, position 1650 to position 1972, position 1700 to position 1972, position 1750 to position 1972, position 1800 to position 1972, position 1850 to position 1972, or position 1900 to position 1972 of amino acid sequence SEQ ID NO: 184.

[0174] In embodiments, the C-terminal fragment of a human SMMHC comprises a C-terminal stretch of SMMHC comprising at least 900, 800, 700, 600, 500, 300, or 200 amino acid residues of SEQ ID NO: 184.

[0175] Suitably, element B may be selected or derived from a C-terminal portion of SMMHC comprising amino acid 1527 to aa1972, or aa1809 to aa1972 (in relation to SEQ ID NO: 184). For example, C-terminal portion of SMMHC comprising amino acid 1527 to aa1972 may comprise an amino acid sequence according to SEQ ID NO: 188). For example, C-terminal portion of SMMHC comprising amino acid 1809 to aa1972 may comprise an amino acid sequence according to SEQ ID NO: 190).

[0176] In preferred embodiments, the SMMHC amino acid sequence is additionally C-terminally truncated.

[0177] Accordingly, the SMMHC amino acid sequence may additionally comprise a C-terminal deletion of at least about 50 amino acids, e.g. 50, 60, 70, 80, 90, 95, or 100 amino acids of amino acid sequence SEQ ID NO: 184.

[0178] Without wishing to be bound to theory, chromosomal rearrangements in humans can lead to a fusion of CBFbeta and SMMHC genes which has been observed inter alia in acute myeloid leukaemia subtype M4Eo (AML with eosinophilia). Interestingly, it has been observed that a deletion of 95 amino acids from the C-terminus of CBFbeta-SMMHC (CBFbeta-SMMHCAC95) blocked leukemogenesis while retaining RUNX1 inhibitory properties in knock in mice. Accordingly, in the context of the invention, a transcription factor inhibitor comprising a deletion in the C-terminus of about 95aa (SMMHCAC95) may be more suitable in certain medical applications. Moreover, a shorter encoded transcription factor inhibitor is beneficial in terms of nucleic acid production.

[0179] In preferred embodiments, the SMMHC amino acid sequence comprises a deletion in the C-terminus of about 95aa (SMMHCAC95), for example an SMMHC fragment comprising aa1527 to aa1877 (in relation to SEQ ID NO: 184). Accordingly, element B may be selected or derived from a C-terminal portion of SMMHC comprising aa1527 to aa1877, or aa1809 to aa1877 (in relation to SEQ ID NO: 184). For example, C-terminal portion of SMMHC comprising amino acid 1527 to aa1877 may comprise an amino acid sequence according to SEQ ID NO: 189). For example, C-terminal portion of SMMHC comprising amino acid 1809 to aa1877 may comprise an amino acid sequence according to SEQ ID NO: 191).

[0180] SMMHC proteins and fragments thereof as defined herein are particularly preferred in the context of the invention as SMMHC elements as defined herein may confer a negative dominant effect to transcription factor inhibitors of the invention.

[0181] Accordingly, amino acid sequence element B of the transcription factor inhibitor can comprise amino acid 1527 to 1972 of human SMMHC (in relation to SEQ ID NO: 184). Another even more preferred SMMHC fragment comprises amino acid 1527 to 1877 (in relation to SEQ ID NO: 184). In some embodiments, the SMMHC fragments comprising amino acid 1809 to 1972 (in relation to SEQ ID NO: 184) or 1809 to 1877 (in relation to SEQ ID NO: 184) may be preferred.

[0182] Other preferred cytoplasmic peptide or proteins, in particular cytoskeletal proteins, may be selected or derived from a synthetic peptide that stains filamentous actin (LifeAct®).

[0183] LifeAct® Dye is a peptide dye composed of a 17 amino acid recombinant peptide that stains actin (e.g. filamentous actin) structures of cells. In preferred embodiments, the amino acid sequence of element B may be selected or derived from a LifeAct® peptide (e.g. SEQ ID NO: 192 or 193).

[0184] In other embodiments, the at least one amino acid sequence element B comprises or consists of an amino acid sequence selected or derived from NFAT5, in particular NFAT5 isoform A, the full sequence being derivable from Uniprot database entry 094916-2 (see also SEQ ID NO: 1521). In preferred embodiments in that context, an N-terminal fragment of the NFAT5 isoform A is selected. For example, an N-terminal fragment comprising amino acid 1 to amino acid 17 of the NFAT5 isoform A according to Uniprot database entry 094916-2 (e.g. MGGACSSFTTSSSPTIY; e.g. SEQ ID NO: 1522). Suitably, introduction of an NFAT5 sequence may keep the target transcription factor (e.g. RUNX1) outside the nucleus via anchoring to plasma membrane e.g. via lipid modification.

[0185] In preferred embodiments in that context, the transcription factor inhibitor (provided by the artificial nucleic acid of the invention) comprises at least one amino acid sequence element B that comprises or consists of an amino acid sequence being identical or at least 70%, 80%, 85%, 86%, 87%, 88%, 89%, 90%, 91%, 92%, 93%, 94%, 95%, 96%, 97%, 98%, or 99% identical to any one of SEQ ID NOs: 184-193, 1521, 1522, or fragments or variants of any of these. Suitable amino acid sequences are also provided in Table 1.

[0186] In particularly preferred embodiments, the transcription factor inhibitor (provided by the artificial nucleic acid of the invention) comprises at least one amino acid sequence element B that comprises or consists of an amino acid sequence selected or derived from a SMMHC fragment being identical or at least 90%, 91%, 92%, 93%, 94%, 95%, 96%, 97%, 98%, or 99% identical to SEQ ID NO: 189, or a fragment or variant thereof.

[0187] In preferred embodiments, the at least one amino acid sequence element B comprises or consists of an amino acid sequence selected or derived from a transcriptional repressor of the target transcription factor, or a fragment or variant thereof.

[0188] Such proteins are particularly suitable as the transcription factor inhibitor of the invention that e.g. binds to a cellular transcription co-factor (e.g. CBFbeta via a RUNX amino acid sequence element A) may act as a repressor of the activity of the target transcription factor.

[0189] In preferred embodiments, the transcriptional repressor of the target transcription factor is selected or derived from any repressor of any of the transcription factors provided in List A.

[0190] In preferred embodiments, the encoded transcriptional repressor of the target transcription factor is selected or derived from RUNX1 Partner Transcriptional Co-Repressor 1 (RUNX1T1), or a fragment or variant thereof.

[0191] RUNX1T1a (RUNX1T1 or CBFA2T1, AML1T1, CBFA2T1, CDR, ETO, MTG8, ZMYND2, AML1-MTG8, t(8;21)(q22;q22), RUNX1 translocation partner 1, RUNX1 partner transcriptional co-repressor 1) is a protein that in humans is encoded by the RUNX1T1 gene. The protein is a Transcriptional corepressor which facilitates transcriptional repression via its association with DNA-binding transcription factors and recruitment of other corepressors and histone-modifying enzymes. There are several described isoforms of RUNX1T1a including isoform 1 (UniProt database entry Q06455-1; SEQ ID NO: 216) that has a length of 604 amino acid residues, and further different isoforms (UniProt database entry Q06455-2, Q06455-3, Q06455-4, Q06455-5, Q06455-6, Q14244-7; SEQ ID NOs: 217-223).

[0192] In preferred embodiments, the RUNX1T1a amino acid sequence selected for element B is derived or selected from an N-terminal fragment of a human RUNX1T1a (that is, it lacks the N-terminal part). The C-terminal region of RUNX1T1a comprises several domains including an NHR1, NHR2, NHR3, NHR4 and an NLS domain. Accordingly, the amino acid sequence of element B may be selected or derived from a N-terminal RUNX1T1a fragment comprising about 574 amino acids of the C-terminus, namely aa31 to aa604 (in relation to SEQ ID NO: 216) or comprising about 583 amino acids of the C-terminus, namely aa22 to aa604 (in relation to SEQ ID NO: 216). For example, the N-terminal RUNX1T1a fragment comprising amino acid 31 to amino acid 604 may comprise an amino acid sequence according to SEQ ID NO: 224).

[0193] RUNX1T1b (CBFA2T2; MTGR1; EHT; ZMYND3; MTG8R; CBFA2/RUNX1) is a protein that in humans is encoded by the CBFA2T2 gene. The protein is a Transcriptional corepressor which facilitates transcriptional repression via its association with DNA-binding transcription factors and recruitment of other corepressors and histone-modifying enzymes. There are several described isoforms of RUNX1T1b including isoform 1 (UniProt database entry O43439-1; SEQ ID NO: 225) that has a has a length of 604 amino acid residues, and further different isoforms (UniProt database entry 043439-2, 043439-3, 043439-4, 043439-5; SEQ ID NOs: 226-228).

[0194] In preferred embodiments, the RUNX1T1b amino acid sequence selected for element B is derived or selected from an N-terminal fragment of a human RUNX1T1b (that is, it lacks the N-terminal part). The C-terminal region of RUNX1T1b comprises several domains including an NHR2, NHR3 and an NLS domain. Accordingly, the amino acid sequence of element B may be selected or derived from a N-terminal RUNX1T1b fragment comprising about 574 amino acids of the C-terminus, namely aa31 to aa604 (in relation to SEQ ID NO: 225) or comprising about 583 amino acids of the C-terminus, namely aa22 to aa604 (in relation to SEQ ID NO: 225). For example, the N-terminal RUNX1T1b fragment comprising amino acid 22 to amino acid 604 may comprise an amino acid sequence according to SEQ ID NO: 230. Another exemplary RUNX1T1b fragment (having a length of about 16 amino acids) may comprise an amino acid sequence according to SEQ ID NO: 229.

[0195] In preferred embodiments, the encoded transcription factor inhibitor comprises at least one amino acid sequence element B that comprises or consists of an amino acid sequence selected or derived from RUNX1T1a or RUNX1T1b being identical or at least 70%, 80%, 85%, 86%, 87%, 88%, 89%, 90%, 91%, 92%, 93%, 94%, 95%, 96%, 97%, 98%, or 99% identical to any one of SEQ ID NOS: 216-230, or fragments or variants of any of these. Suitable amino acid sequences are also provided in Table 1.

[0196] In preferred embodiments, the at least one amino acid sequence element B comprises or consists of an amino acid sequence selected or derived from a peptide or protein that promotes degradation of the target transcription factor, or a fragment or variant thereof.

[0197] Such proteins are particularly suitable as the transcription factor inhibitor of the invention that e.g. binds to a cellular target transcription factor (e.g. RUNX via a CBFbeta amino acid sequence element A) may act as degradation signal or degradation promoter for the respective cellular target transcription factor (e.g. RUNX).

[0198] In preferred embodiments in that context, the encoded peptide or protein that promotes degradation is selected or derived from a protein that binds to E3 ligase. Examples of such proteins comprise HIF1alpha, MDM2, or CRBN, or a fragment or variant of any of these. Particularly preferred in that context is HIF1alpha.

[0199] HIF1alpha is a protein that in humans is encoded by the HIF1A gene. There are several described isoforms of HIF1alpha including isoform 1 (UniProt database entry Q16665-1; SEQ ID NO: 194) that has a has a length of 826 amino acid residues, and further different isoforms (UniProt database entry Q16665-2, Q16665-3).

[0200] In preferred embodiments, the HIF1alpha amino acid sequence selected for element B is derived or selected from a fragment of a human HIF1alpha. Accordingly, the amino acid sequence of element B may be selected or derived from a HIF1alpha fragment comprising aa549 to aa575 (in relation to SEQ ID NO: 194). For example, the HIF1alpha fragment comprising amino acid 549 to amino acid 575 may comprise an amino acid sequence according to SEQ ID NO: 195.

[0201] Transcription factor inhibitors comprising a peptide or protein that promotes degradation (e.g. HIF1alpha) may cause proteasome mediated degradation of the target transcription factor (e.g. RUNX) upon binding (e.g. mediated via CBFbeta). For example, in a cellular context, HIF1alpha modified via Prolyl hydroxylation, ubiquitylated and targeted for proteosomal degradation via binding to E3 ligase like VHL. Other examples of a similar mechanism include peptides with motif binding domains for other E3 ubiquitin ligases like MDM2 and CRBN.

[0202] In preferred embodiments, the encoded transcription factor inhibitor comprises at least one amino acid sequence element B that comprises or consists of an amino acid sequence selected or derived from HIF1alpha being identical or at least 70%, 80%, 85%, 86%, 87%, 88%, 89%, 90%, 91%, 92%, 93%, 94%, 95%, 96%, 97%, 98%, or 99% identical to any one of SEQ ID NOs: 194 or 195, or fragments or variants of any of these. Suitable amino acid sequences are also provided in Table 1.

[0203] Preferred amino acid sequence elements (element A and B) of the encoded transcription factor inhibitors and corresponding nucleic acid sequences are provided in Table 1. Therein, each row corresponds to a suitable amino acid sequence elements that may be comprised in a transcription factor inhibitor. Rows 1 to 8 responds to a suitable amino acid sequence element A as defined herein. Rows 9 to 23 responds to a suitable amino acid sequence element A as defined herein. Column A of Table 1 provides a short description of the respective amino acid element. Column B of Table 1 provides protein (amino acid sequence) SEQ ID NOs of respective amino acid elements. Column C of Table 1 provides SEQ ID NO of the corresponding wild type or reference nucleic acid coding sequences. Column D of Table 1 provides SEQ ID NO of the corresponding G/C optimized nucleic acid coding sequences (opt1). Column E of Table 1 provides SEQ ID NO of corresponding human codon usage adapted nucleic acid coding sequences (opt 3). Column F of Table 1 provides SEQ ID NO of further codon optimized coding sequences (opt4, opt5, opt11). Preferred encoded transcription factor inhibitors that comprise the elements of Table 1 and respective nucleic acid sequences encoding said transcription factor inhibitors are provided in Tables 2, 3, and 4.

TABLE 1
Element A and B of transcription factor inhibitors (amino acid sequences and cds sequences):

| | | | | | | |
|---|---|---|---|---|---|---|
| row | A | B | C | D | E | F |

Element A sequences:

| | | | | | | |
|---|---|---|---|---|---|---|
| 1 | CBFbeta | 178-181 | 240-243, | 364-367, | 488-491, | 612-615, 674- |
| | | | 302-305 | 426-429 | 550-553 | 677, 736-739 |
| 2 | CBFbeta(1-141) | 182 | 244, 306 | 368, 430 | 492, 554 | 616, 678, 740 |
| 3 | CBFbeta(1-165) | 183 | 245, 307 | 369, 431 | 493, 555 | 617, 679, 741 |
| 4 | RUNX1 | 198-212 | 260-274, | 384-398, | 508-522, | 632-646, 694- |
| | | | 322-336 | 446-460 | 570-584 | 708, 756-770 |
| 5 | RUNX1(1-128) | 213 | 275, 337 | 399, 461 | 523, 585 | 647, 709, 771 |
| 6 | RUNX1(1-177) | 214 | 276, 338 | 400, 462 | 524, 586 | 648, 710, 772 |
| 7 | RUNX1(1-241) | 215 | 277, 339 | 401,463 | 525, 587 | 649, 711, 773 |
| 8 | RUNX1(K83E, R174Q) | 197 | 259, 321 | 383, 445 | 507, 569 | 631, 693, 755 |

Element B sequences:

| | | | | | | |
|---|---|---|---|---|---|---|
| 9 | SMMHC | 184-187 | 246-249, | 370-373, | 494-497, | 618-621, 680- |
| | | | 308-311 | 432-435 | 556-559 | 683, 742-745 |
| 10 | SMMHC(1527-1972) | 188 | 250, 312 | 374, 436 | 498, 560 | 622, 684, 746 |
| 11 | SMMHC(1527-1877) | 189 | 251, 313 | 375, 437 | 499, 561 | 623, 685, 747 |
| | (SMMHCΔC95) | | | | | |
| 12 | SMMHC(1809-1972) | 190 | 252, 314 | 376, 438 | 500, 562 | 624, 686, 748 |
| 13 | SMMHC(1809-1877) | 191 | 253, 315 | 377, 439 | 501, 563 | 625, 687, 749 |
| 14 | LifeAct ® | 192, 193 | 254, 255, | 378, 379, | 502, 503, | 626, 627, 688, |
| | | | 316, 317 | 440, 441 | 564, 565 | 689, 750, 751 |
| 15 | RUNX1T1a | 216-223 | 278-285, | 402-409, | 526-533, | 650-657, 712- |
| | | | 340-347 | 464-471 | 588-595 | 719, 774-781 |
| 16 | RUNX1T1a(31-604) | 224 | 286, 348 | 410, 472 | 534, 596 | 658, 720, 782 |
| 17 | RUNX1T1b | 225-228 | 287-290, | 411-414, | 535-538, | 659-662, 721- |
| | | | 349-352 | 473-476 | 597-600 | 724, 783-786 |
| 18 | RUNX1T1b(22-604) | 230 | 292, 354 | 416, 478 | 540, 602 | 664, 726, 788 |
| 19 | RUNX1T1b(short) | 229 | 291, 353 | 415, 477 | 539, 601 | 663, 725, 787 |
| 20 | HIF1alpha | 194 | 256, 318 | 380, 442 | 504, 566 | 628, 690, 752 |
| 21 | HIF1alpha(549-575) | 195 | 257, 319 | 381, 443 | 505, 567 | 629, 691, 753 |
| 22 | NFAT5 | 1521 | 1523, 1525 | 1527, 1529 | 1531, 1533 | 1535, 1537, 1539 |
| 23 | NFAT5(1-17) | 1522 | 1524, 1526 | 1528, 1530 | 1532, 1534 | 1536, 1538, 1540 |

### Amino Acid Sequences Comprising Element A and Element B

[0204] In preferred embodiments, the artificial nucleic acid of the invention comprises at least one coding sequence encoding at least one transcription factor inhibitor for reducing or inhibiting the activity of a target transcription factor in a cell, wherein the transcription factor inhibitor comprises or consists of at least one amino acid sequence element A as defined herein (preferably as in Table 1; rows 1 to 8) or at least one amino acid sequence element B as defined herein (preferably as in Table 1; rows 9 to 23).

[0205] In particularly preferred embodiments, the artificial nucleic acid of the invention comprises at least one coding sequence encoding at least one transcription factor inhibitor for reducing or inhibiting the activity of a target transcription factor in a cell, wherein the transcription factor inhibitor comprises or consists of at least one amino acid sequence element A as defined herein (preferably as in Table 1; rows 1 to 8) and at least one amino acid sequence element B as defined herein (preferably as in Table 1; rows 9 to 23).

[0206] In particularly preferred embodiments, the transcription factor inhibitor (that is provided by the artificial nucleic acid of the invention) is a fusion protein that comprises or consists of at least one amino acid sequence element A as defined herein and at least one amino acid sequence element B as defined herein.

[0207] In preferred embodiments, the at least one element A is located at the N-terminus of the transcription inhibitor and the at least one element B is located at the C-terminus of the transcription inhibitor.

[0208] In preferred embodiments, the encoded transcription factor inhibitor additionally comprises at least one further amino acid sequence element.

[0209] Suitably, the at least one further amino acid sequence element is selected from at least one linker sequence, at least one transmembrane domain, at least one secretion signal, an element that extends protein half-life, or a fragment or variant of any of these.

[0210] Suitable multimerization domains may be selected from the list of amino acid sequences according to SEQ ID NOs: 1116-1167 of WO2017081082, or fragments or variants of these sequences. Suitable transmembrane elements may be selected from the list of amino acid sequences according to SEQ ID NOs: 1228-1343 of WO2017081082, or fragments or variants of these sequences. Suitable secretory signal peptides may be selected from the list of amino acid sequences according to SEQ ID NOs: 1-1115 and SEQ ID NO: 1728 of published PCT patent application WO2017081082, or fragments or variants of these sequences.

[0211] In particularly preferred embodiments, the encoded transcription factor inhibitor comprises at least one further amino acid sequence element selected from a linker sequence. Suitable peptide linkers may be selected from the list of amino acid sequences according to SEQ ID NOs: 1509-1565 of the patent application WO2017081082, or fragments or variants of these sequences.

[0212] A preferred linker in the context of the invention is a flexible linker, preferably a GGS linker, more preferably a GGS linker according to SEQ ID NO: 196, or a variant thereof.

[0213] The use of peptide linker sequence may be advantageous in embodiments where the encoded transcription factor inhibitor is a fusion protein comprising at least one element A and the at least one element B. In such embodiments, the peptide linker sequence may be located (in a fusion protein) between element A and element B. As an example, introducing a linker sequence may inter alia improve the binding of the encoded transcription factor inhibitor to the target transcription factor or its co-factor (via element A), or may inter alia improve the binding or capturing of the transcription factor inhibitor to the cytoskeleton of the cell (via element B).

[0214] In preferred embodiments, the encoded transcription factor inhibitor comprises at least one element that extends protein half-life. Suitable element that extends protein half-life may be selected from the list of amino acid sequences according to SEQ ID NOs: 1671-1727 of WO2017081082, or fragments or variants of these sequences. The element that extends protein half-life is typically located at the N- or at the C-terminus of the transcription factor inhibitor of the invention. Transcription factor inhibitors comprising element that extends protein half-life are preferred in the context of medical treatments as e.g. the therapeutic effect is prolonged and/or the number of administrations can be reduced. That is particularly preferred in the context of ocular administration.

[0215] Accordingly, the encoded transcription factor inhibitor of the invention may comprise the following amino acid sequence elements, preferably selected from Table 1:
[0216] element A
[0217] element A-linker-element B
[0218] element B-linker-element A
[0219] element A-element B
[0220] element B-element A

[0221] Particularly preferred transcription factor inhibitor protein designs are provided in Table 2, column A.

[0222] In preferred embodiments, the encoded transcription factor inhibitor is a RUNX inhibitor, for example a RUNX1, RUNX2, and/or RUNX3 inhibitor. In particularly preferred embodiments, the encoded transcription factor inhibitor is a RUNX1 inhibitor.

[0223] In preferred embodiments, the encoded transcription factor inhibitor is a RUNX trap, for example a RUNX1, RUNX2, and/or RUNX3 trap. In particularly preferred embodiments, the encoded transcription factor trap is a RUNX1 trap.

[0224] Accordingly, in preferred embodiments, the transcription factor inhibitor is a RUNX trap that is configured to bind to a cellular RUNX transcription factor (e.g. via an amino acid sequence that interacts or binds to the target transcription factor, e.g. CBFbeta) and is additionally capable of capturing said RUNX transcription factor in the cytosol (e.g. via an amino acid sequence that blocks nuclear translocation of the target transcription factor, e.g. SMMHC). A “RUNX trap” is particularly suitable in the context of the invention as the target transcription factor RUNX is blocked from entering into the nucleus where RUNX typically acts. Blocking of the RUNX to enter into the nucleus (e.g. RUNX1) may also be associated with a reduced or blocked transport of its cellular transcription co-factors (e.g. CBFbeta), in particular in cases where the transcription co-factors of the target transcription factor is transported via the transcription factor into the nucleus. Of course, in such a case, a capturing of the RUNX in the cytosol (e.g. RUNX1) would, at the same time, prevent or reduce the transport of its transcription co-factors (e.g. CBFbeta) into the nucleus (e.g. CBFbeta needs RUNX for nuclear translocation).

[0225] According to various preferred embodiments, the artificial nucleic acid of the invention comprises at least one coding sequence encoding at least one RUNX inhibitor or trap, preferably the RUNX trap, comprising or consisting of
[0226] at least one amino acid sequence element A selected or derived from a transcription co-factor of a transcription factor of list A, or a preferred transcription factor as defined herein, and
[0227] at least one amino acid sequence element B selected or derived from a cytoplasmic protein as defined herein, preferably selected or derived from a cytoskeletal protein as defined herein, more preferably selected from SMMHC as defined herein.

[0228] According to various preferred embodiments, the artificial nucleic acid of the invention comprises at least one coding sequence encoding at least one RUNX inhibitor or trap, preferably the RUNX trap, comprising or consisting of
[0229] at least one amino acid sequence element A selected or derived from a transcription co-factor of RUNX as defined herein, more preferably selected or derived from CBFbeta as defined herein, and
[0230] at least one amino acid sequence element B selected or derived from a cytoplasmic protein as defined herein, preferably selected or derived from a cytoskeletal protein as defined herein, more preferably selected from SMMHC as defined herein.

[0231] In preferred embodiments, the encoded RUNX inhibitor, preferably the RUNX trap, comprises or consists of a fusion protein comprising a CBFbeta amino acid sequence element (element A) as defined herein and an SMMHC amino acid element (element B) as defined herein. Optionally, a linker sequence may be located between element A and element B.

[0232] Suitably, the encoded RUNX inhibitor, preferably the RUNX trap, comprises or consists of
[0233] at least one amino acid sequence element A selected or derived from CBFbeta, preferably wherein amino acid sequence element A comprises or consists of an amino acid sequence being identical or at least 70%, 80%, 85%, 86%, 87%, 88%, 89%, 90%, 91%, 92%, 93%, 94%, 95%, 96%, 97%, 98%, or 99% identical to any one of SEQ ID NOS: 178-183, or fragments or variants of any of these, and
[0234] at least one amino acid sequence element B selected or derived from SMMHC, LifeAct®, or NFAT5, preferably wherein amino acid sequence element B comprises or consists of an amino acid sequence being identical or at least 70%, 80%, 85%, 86%, 87%, 88%, 89%, 90%, 91%, 92%, 93%, 94%, 95%, 96%, 97%, 98%, or 99% identical to any one of SEQ ID NOs: 184-193, 1521, 1522, or fragments or variants of any of these, and
[0235] optionally, at least one linker sequence located between element A and element B, preferably selected from a flexible linker, more preferably a flexible GGS linker according to SEQ ID NO: 196, or a fragment or variant thereof.

[0236] In particularly preferred embodiments, the encoded RUNX inhibitor, preferably the RUNX trap, comprises or consists of
[0237] at least one amino acid sequence element A selected or derived from CBFbeta, wherein amino acid sequence element A comprises or consists of an amino acid sequence being identical or at least 70%, 80%, 85%, 86%, 87%, 88%, 89%, 90%, 91%, 92%, 93%, 94%, 95%, 96%, 97%, 98%, or 99% identical to SEQ ID NO: 183, or fragment or variant thereof, and
[0238] at least one amino acid sequence element B selected or derived from SMMHC, wherein amino acid sequence element B comprises or consists of an amino acid sequence being identical or at least 70%, 80%, 85%, 86%, 87%, 88%, 89%, 90%, 91%, 92%, 93%, 94%, 95%, 96%, 97%, 98%, or 99% identical to SEQ ID NO: 189, or a fragment or variant thereof.

[0239] In preferred embodiments, the encoded transcription factor inhibitor, preferably the RUNX trap (CBFbeta-SMMHC), comprises or consists of an amino acid sequence being identical or at least 70%, 80%, 85%, 86%, 87%, 88%, 89%, 90%, 91%, 92%, 93%, 94%, 95%, 96%, 97%, 98%, or 99% identical to any one of SEQ ID NOs: 231-233, 1541-1548, or fragments or variants thereof. Suitable amino acid sequences are also provided in Table 2.

[0240] In preferred embodiments, the encoded transcription factor inhibitor, preferably the RUNX trap (CBFbeta-SMMHC), comprises or consists of an amino acid sequence being identical or at least 70%, 80%, 85%, 86%, 87%, 88%, 89%, 90%, 91%, 92%, 93%, 94%, 95%, 96%, 97%, 98%, or 99% identical to any one of SEQ ID NOs: 231 or 232, or fragments or variants of CBFbeta-SMMHC proteins.

[0241] In particularly preferred embodiments, the encoded transcription factor inhibitor, preferably the RUNX trap (CBFbeta-SMMHC), comprises or consists of an amino acid sequence being identical or at least 70%, 80%, 85%, 86%, 87%, 88%, 89%, 90%, 91%, 92%, 93%, 94%, 95%, 96%, 97%, 98%, or 99% identical to any one of SEQ ID NO: 232, or fragments or variants thereof.

[0242] In particularly preferred embodiments, upon administration of the artificial nucleic acid to a cell or subject, the produced RUNX inhibitor or trap (e.g. CBFbeta-SMMHC) sequesters cellular RUNX by binding to RUNX in the cytosol and preferably trapping RUNX in the cytosol. Said binding to RUNX in the cytosol leads to the formation of RUNX CBFbeta-SMMHC complexes. Accordingly, the formation of cellular RUNX-CBFbeta heterodimer is reduced or prevented.

[0243] In particularly preferred embodiments, upon administration of the artificial nucleic acid to a cell or subject, the produced RUNX inhibitor or trap (e.g. CBFbeta-SMMHC) reduces or prevents the translocation of cellular CBFbeta from the cytosol to the nucleus by reducing or preventing its interaction with cellular RUNX. Accordingly, the formation of cellular RUNX-CBFbeta heterodimer is reduced or prevented.

[0244] In preferred embodiments, the RUNX inhibitor or trap (e.g. CBFbeta-SMMHC) is configured to bind more than one cellular RUNX protein, preferably about two cellular RUNX proteins.

[0245] In some embodiments, upon administration of the artificial nucleic acid to a cell or subject, the produced RUNX inhibitor or trap (e.g. CBFbeta-SMMHC) binds cellular RUNX transcription factor and a subset of the formed complex (RUNX bound to CBFbeta-SMMHC) may enter the nucleus, wherein a larger subset of RUNX CBFbeta-SMMHC complex is preferably trapped in the cytosol. Advantageously, the subset of RUNX CBFbeta-SMMHC complex that may enter the nucleus drives transcriptional repression of genes that are under control of RUNX.

[0246] In other embodiments, the RUNX inhibitor comprises or consists of a fusion protein comprising a CBFbeta amino acid sequence element as defined herein and an HIF1alpha amino acid sequence element as defined herein.

[0247] Suitably in that context, the encoded RUNX inhibitor comprises or consists of
[0248] at least one amino acid sequence element A selected or derived from CBFbeta, preferably wherein amino acid sequence element A comprises or consists of an amino acid sequence being identical or at least 70%, 80%, 85%, 86%, 87%, 88%, 89%, 90%, 91%, 92%, 93%, 94%, 95%, 96%, 97%, 98%, or 99% identical to any one of SEQ ID NOs: 178-183, or fragments or variants of any of these, and
[0249] at least one amino acid sequence element B selected or derived from HIF1alpha, preferably wherein amino acid sequence element B comprises or consists of an amino acid sequence being identical or at least 70%, 80%, 85%, 86%, 87%, 88%, 89%, 90%, 91%, 92%, 93%, 94%, 95%, 96%, 97%, 98%, or 99% identical to any one of SEQ ID NOs: 194-195, or fragments or variants of any of these, and
[0250] optionally, at least one linker sequence located between element A and element B, preferably selected from a flexible linker, more preferably a flexible GGS linker according to SEQ ID NO: 189, or a fragment or variant thereof.

[0251] In preferred embodiments, the encoded transcription factor inhibitor, preferably the RUNX inhibitor (CBFbeta-HIF1alpha), comprises or consists of an amino acid sequence being identical or at least 70%, 80%, 85%, 86%, 87%, 88%, 89%, 90%, 91%, 92%, 93%, 94%, 95%, 96%, 97%, 98%, or 99% identical to any one of SEQ ID NOs: 234 or 235, or fragments or variants thereof. Suitable amino acid sequences are also provided in Table 2.

[0252] Suitably in that context, the RUNX inhibitor (CBFbeta-HIF1alpha) degrades cellular RUNX, preferably cellular RUNX1.

[0253] According to other preferred embodiments, the artificial nucleic acid of the invention comprises at least one coding sequence encoding at least one RUNX inhibitor comprising or consisting of
[0254] at least one amino acid sequence element A selected or derived from the target transcription factor as defined herein, more preferably selected or derived from RUNX1 as defined herein, and
[0255] at least one amino acid sequence element B selected or derived from a transcriptional repressor of the target transcription factor as defined herein, preferably selected or derived from RUNX1T1a or RUNX1T1b.

[0256] Accordingly, the encoded RUNX inhibitor comprises or consists of a fusion protein comprising a RUNX1 amino acid sequence element (element A) and a RUNX1T1a or RUNX1T1b amino acid sequence element (element B). Optionally, a linker sequence may be located between element A and element B.

[0257] Suitably, the encoded RUNX inhibitor comprises or consists of
[0258] at least one amino acid sequence element A selected or derived from RUNX1, preferably wherein amino acid sequence element A comprises or consists of an amino acid sequence being identical or at least 70%, 80%, 85%, 86%, 87%, 88%, 89%, 90%, 91%, 92%, 93%, 94%, 95%, 96%, 97%, 98%, or 99% identical to any one of SEQ ID NOS: 197-215, or fragments or variants of any of these, and
[0259] at least one amino acid sequence element B selected or derived from RUNX1T1a or RUNX1T1b, preferably wherein amino acid sequence element B comprises or consists of an amino acid sequence being identical or at least 70%, 80%, 85%, 86%, 87%, 88%, 89%, 90%, 91%, 92%, 93%, 94%, 95%, 96%, 97%, 98%, or 99% identical to any one of SEQ ID NOs: 216-230, or fragments or variants of any of these, and
[0260] optionally, at least one linker sequence located between element A and element B, preferably selected from a flexible linker, more preferably a flexible GGS linker according to SEQ ID NO: 189, or a fragment or variant thereof.

[0261] In preferred embodiments, the encoded transcription factor inhibitor, preferably the RUNX inhibitor (RUNX1-RUNX1T1a, RUNX1-RUNX1T1b), comprises or consists of an amino acid sequence being identical or at least 70%, 80%, 85%, 86%, 87%, 88%, 89%, 90%, 91%, 92%, 93%, 94%, 95%, 96%, 97%, 98%, or 99% identical to any one of SEQ ID NOs: 236-239, or fragments or variants of any of these. Suitable amino acid sequences are also provided in Table 2.

[0262] According to other embodiments, the artificial nucleic acid of the invention comprises at least one coding sequence encoding at least one RUNX inhibitor comprising or consisting of
[0263] at least one amino acid sequence element A selected or derived from the target transcription factor that comprises at least one amino acid substitution or deletion that reduces or prevents binding to its target DNA and/or at least one amino acid substitution or deletion that reduces or prevents nuclear translocation as defined herein, more preferably selected or derived from RUNX1 comprising an amino acid substitution selected from R174Q and/or K83E, or any functionally equivalent amino acid substitution at position R174 and/or K83.

[0264] In preferred embodiments, the encoded transcription factor inhibitor, preferably the RUNX inhibitor (RUNX1(K83E,R174Q)), comprises or consists of an amino acid sequence being identical or at least 70%, 80%, 85%, 86%, 87%, 88%, 89%, 90%, 91%, 92%, 93%, 94%, 95%, 96%, 97%, 98%, or 99% identical to SEQ ID NO: 197, or a fragment or variant thereof. Suitable amino acid sequences are also provided in Table 2.

[0265] In preferred embodiments, upon administration of the artificial nucleic acid to a cell or subject, the produced RUNX inhibitor (e.g. RUNX1-RUNX1T1; RUNX1 (K83E,R174Q)) sequesters cellular CBFbeta by binding to CBFbeta in the cytosol. Accordingly, the formation of cellular RUNX-CBFbeta heterodimer is reduced or prevented.

[0266] In preferred embodiments, upon administration of the artificial nucleic acid to a cell or subject, the produced RUNX inhibitor (e.g. RUNX1-RUNX1T1; RUNX1 (K83E,R174Q)) drives transcriptional repression of genes that are under control of RUNX.

[0267] In preferred embodiments, upon administration of the artificial nucleic acid to a cell or subject, the produced RUNX inhibitor reduces or prevents the interaction of cellular RUNX with cellular CBFbeta. Accordingly, the formation of a cellular RUNX-CBFbeta heterodimeric complex is inhibited. In particularly preferred embodiments, upon administration of the artificial nucleic acid, the produced RUNX trap (e.g. CBFB-SMMHC) reduces or prevents the interaction of cellular RUNX with cellular CBFbeta. Accordingly, the formation of a cellular RUNX-CBFbeta heterodimeric complex is inhibited.

[0268] Accordingly, in preferred embodiments, upon administration of the artificial nucleic acid to a cell or subject, the produced RUNX inhibitor, preferably the RUNX trap, reduces cellular RUNX-CBFbeta complex formation and/or activity, preferably cellular RUNX-CBFbeta complex formation and/or activity. Suitably, as result of reducing cellular RUNX-CBFbeta complex formation and/or activity, the transcription activity of RUNX is reduced in the cell or subject.

[0269] Accordingly, in preferred embodiments, upon administration of the artificial nucleic acid to a cell or subject, the produced RUNX inhibitor, preferably the RUNX trap, reduces the cellular expression of RUNX controlled genes or gene products.

[0270] In particularly preferred embodiments, upon administration of the artificial nucleic acid to a cell or subject, the produced RUNX inhibitor, preferably the RUNX trap, reduces the cellular expression of TGFbeta2 (TGFβ2), SMAD3, and/or COL1A1.

[0271] In preferred embodiments, upon administration of the artificial nucleic acid to a cell or subject, the produced RUNX inhibitor, preferably the RUNX trap, increase the transcription rate of MARVELD2. MARVELD2 is a tight junction associated epithelial marker, as a predictor of the future state of the cell.

[0272] In preferred embodiments, upon administration of the artificial nucleic acid to a cell or subject, the produced RUNX inhibitor, preferably the RUNX trap, reduces or prevents pathological epithelial to mesenchymal transition (EMT), pathological cell proliferation, aberrant angiogenesis, aberrant (ocular) neovascularization, degeneration, and/or fibrosis. In embodiments, the administered artificial nucleic acid encoding the RUNX inhibitor or trap reduces or prevents pathological epithelial to mesenchymal transition (EMT), pathological cell proliferation, aberrant angiogenesis, aberrant (ocular) neovascularization, degeneration, and/or fibrosis in a more effective way as a small molecule inhibitor of RUNX (e.g. Ro5-335) or at least comparably effective as a small molecule inhibitor of RUNX (e.g. Ro5-335).

[0273] In preferred embodiments, upon administration of the artificial nucleic acid to a cell or subject, the produced RUNX inhibitor, preferably the RUNX trap, reduces or prevents pathological epithelial to mesenchymal transition (EMT).

[0274] Accordingly, in preferred embodiments, upon administration of the artificial nucleic acid to a cell or subject, the produced RUNX inhibitor, preferably the RUNX trap, reduces the cellular expression of RUNX, preferably RUNX1.

[0275] In cells, the expression of RUNX is regulated by self-regulatory feedback loops. That means that e.g. cellular RUNX proteins can activate their own expression (self-activation). As the RUNX inhibitor of the present invention may reduce or inhibit the activity of the target transcription factor RUNX in a cell (e.g. RUNX1), that can also lead to a reduced expression of RUNX. As exemplified herein for a RUNX1 trap, administration of an artificial nucleic acid encoding CBFB-SMMHC leads to a reduction of the cellular expression of RUNX1 (see Example section).

[0276] Preferred transcription factor inhibitors as defined herein are provided in Table 2. Therein, each row corresponds to a suitable transcription factor inhibitor construct. Column A of Table 2 provides a short description of suitable transcription factor inhibitor constructs. Column B of Table 2 provides protein (amino acid sequence) SEQ ID NOs of respective suitable transcription factor inhibitor constructs. Column C of Table 2 provides SEQ ID NO of the corresponding wild type or reference nucleic acid coding sequences. Column D of Table 2 provides SEQ ID NO of the corresponding G/C optimized nucleic acid coding sequences (opt1). Column E of Table 2 provides SEQ ID NO of the corresponding human codon usage adapted nucleic acid coding sequences (opt 3). Column F of Table 2 provides SEQ ID NO of further corresponding codon optimized nucleic acid coding sequences (opt4, opt5, opt11). Notably, the description of the invention explicitly includes the information provided under “feature key”, i.e. “source” (for nucleic acids or proteins) or “misc_feature” (for nucleic acids) or “REGION” (for proteins) of the ST.26 sequence listing of the present application. Preferred RNA constructs comprising coding sequences of Table 2, e.g. mRNA sequences, are provided in Table 3 and Table 4.

TABLE 2
Transcription factor inhibitor constructs (amino acid sequences and coding sequences):

| row | A | B | C | D | E | F |
|---|---|---|---|---|---|---|
| 1 | CBFbeta(1-165)-SMMHC(1527-1877) | 232 | 294, 356 | 418, 480 | 542, 604 | 666, 1557, 728, |
| | (CBFbeta-SMMHCΔC95) | | | | | 790, 1558 |
| 2 | CBFbeta(1-165)-SMMHC(1527-1927) | 231 | 293, 355 | 417, 479 | 541, 603 | 665, 727, 789 |
| 3 | CBFbeta(1-141)-SMMHC(1527-1877) | 1545 | | 1553 | | |
| 4 | CBFbeta(1-130)-Linker-Linker- | 1546 | | 1554 | | |
| | SMMHC(1527-1877) | | | | | |
| 5 | CBFbeta(1-165)-Linker-LifeAct | 233 | 295, 357 | 419, 481 | 543, 605 | 667, 729, 791 |
| 6 | CBFbeta(1-165)-Linker-LifeAct | 1547 | | 1555 | | |
| 7 | CBFbeta(1-165)-Linker-LifeAct | 1548 | | 1556 | | |
| 8 | CBFbeta(1-165)-HIF1alpha(549-575) | 234 | 296, 358 | 420, 482 | 544, 606 | 668, 730, 792 |
| 9 | CBFbeta(1-165)-Linker-HIF1alpha(549- | 235 | 297, 359 | 421, 483 | 545, 607 | 669, 731, 793 |
| | 575) | | | | | |
| 10 | CBFbeta(1-165)-Linker-NFAT5(1-17) | 1541 | | 1549 | | |
| 11 | NFAT5(1-17)-Linker-CBFbeta(1-165) | 1542 | | 1550 | | |
| 12 | CBFbeta(1-165)-NFAT5(1-17) | 1543 | | 1551 | | |
| 13 | NFAT5(1-17)-CBFbeta(1-165) | 1544 | | 1552 | | |
| 14 | RUNX1(1-241)-RUNX1T1b(short) | 237 | 299, 361 | 423, 485 | 547, 609 | 671, 733, 795 |
| 15 | RUNX1(1-241)-RUNX1T1b(22-604) | 238, 239 | 300, 301, | 424, 425, | 548, 549, | 672, 673, 734, |
| | | | 362, 363 | 486, 487 | 610, 611 | 735, 796, 797 |
| 16 | RUNX1(1-177)-RUNX1T1a(31-604) | 236 | 298, 360 | 422, 484 | 546, 608 | 670, 732, 794 |
| 17 | RUNX1(K83E, R174Q) | 197 | 259, 321 | 383, 445 | 507, 569 | 631, 693, 755 |

### Suitable Coding Sequences:

[0277] According to preferred embodiments, the artificial nucleic acid of the invention comprises at least one coding sequence encoding at least one transcription factor trap as defined herein. In that context, any coding sequence encoding at least one transcription factor trap as defined herein, or fragments and variants thereof may be understood as suitable coding sequence and may therefore be comprised in the nucleic acid of the invention.

[0278] In preferred embodiments, the artificial nucleic acid of the invention comprises or consists of at least one coding sequence encoding at least one transcription factor inhibitor or trap as defined herein, preferably encoding any one of SEQ ID NOS: 178-195, 197-239, 1521, 1522, 1541-1548, or fragments of variants thereof. It has to be understood that, on nucleic acid level, any sequence which encodes an amino acid sequences being identical or at least 70%, 80%, 85%, 86%, 87%, 88%, 89%, 90%, 91%, 92%, 93%, 94%, 95%, 96%, 97%, 98%, or 99% identical to any one of SEQ ID NOs: 178-195, 197-239, 1521, 1522, 1541-1548, or fragments or variants thereof, may be selected and may accordingly be understood as suitable coding sequence of the invention. Further information regarding said amino acid sequences is also provided in e.g. Tables 1 and 2.

[0279] In preferred embodiments, the artificial nucleic acid comprises at least one coding sequence that comprises at least one of the nucleic acid sequences being identical or at least 70%, 80%, 85%, 86%, 87%, 88%, 89%, 90%, 91%, 92%, 93%, 94%, 95%, 96%, 97%, 98%, or 99% identical to the sequences according to any one of SEQ ID NOs: 240-797, 1523-1540, 1549-1558, or a fragment or a fragment or variant of any of these sequences. Further information regarding said nucleic acid sequences is also provided in e.g. Tables 1 and 2.

[0280] In preferred embodiments, the artificial nucleic acid is a modified and/or stabilized nucleic acid.

[0281] According to preferred embodiments, the artificial nucleic acid may thus be provided as a “stabilized nucleic acid” that is to say a nucleic acid showing improved resistance to in vivo degradation and/or a nucleic acid showing improved stability in vivo, and/or a nucleic acid showing improved translatability in vivo. This is particularly important in embodiments where the nucleic acid is an RNA.

[0282] Preferably, the artificial nucleic of the present invention may be provided as a “stabilized nucleic acid”, preferably a “stabilized RNA”.

[0283] In the following, suitable modifications/adaptations are described that are capable of “stabilizing” the nucleic acid, preferably the RNA.

[0284] In particularly preferred embodiments, the artificial nucleic acid comprises at least one codon modified coding sequence.

[0285] In preferred embodiments, the at least one coding sequence of the artificial nucleic acid is a codon modified coding sequence. Suitably, the amino acid sequence encoded by the at least one codon modified coding sequence is not being modified compared to the amino acid sequence encoded by the corresponding wild type or reference coding sequence.

[0286] The term “codon modified coding sequence” relates to coding sequences that differ in at least one codon (triplets of nucleotides coding for one amino acid) compared to the corresponding wild type or reference coding sequence. Suitably, a codon modified coding sequence in the context of the invention may show improved resistance to in vivo degradation and/or improved stability in vivo, and/or improved translatability in vivo. Codon modifications in the broadest sense make use of the degeneracy of the genetic code wherein multiple codons may encode the same amino acid and may be used interchangeably to optimize/modify the coding sequence for in vivo applications.

[0287] In particularly preferred embodiments, the at least one coding sequence of the artificial nucleic acid is a codon modified coding sequence, wherein the codon modified coding sequence is selected from C maximized coding sequence, CAI maximized coding sequence, human codon usage adapted coding sequence, G/C content modified coding sequence, and G/C optimized coding sequence, or any combination thereof.

[0288] In preferred embodiments, the at least one codon modified coding sequence is a G/C optimized coding sequence

[0289] In preferred embodiments, the at least one coding sequence of the artificial nucleic acid, preferably the RNA, has a G/C content of at least about 50%, 55%, or 60%. In particular embodiments, the at least one coding sequence of the nucleic acid has a G/C content of at least about 50%, 51%, 52%, 53%, 54%, 55%, 56%, 57%, 58%, 59%, 60%, 61%, 62%, 63%, 64%, 65%, 66%, 67%, 68%, 69%, or 70%.

[0290] When transfected into mammalian host cells, the nucleic acid comprising the codon modified coding sequence has a stability of between 12-18 hours, or greater than 18 hours, e.g., 24, 36, 48, 60, 72, or greater than 72 hours and is capable of being expressed by the mammalian host cell.

[0291] When transfected into mammalian host cells, the artificial nucleic acid comprising the codon modified coding sequence is translated into protein, wherein the amount of protein is at least comparable to, or preferably at least 10% more than, or at least 20% more than, or at least 30% more than, or at least 40% more than, or at least 50% more than, or at least 100% more than, or at least 200% or more than the amount of protein obtained by a naturally occurring or wild type or reference coding sequence transfected into mammalian host cells.

[0292] In some embodiments, the artificial nucleic acid may be modified, wherein the C content of the at least one coding sequence may be increased, preferably maximized, compared to the C content of the corresponding wild type or reference coding sequence (herein referred to as “C maximized coding sequence”). The generation of a C maximized nucleic acid sequences may suitably be carried out using a modification method according to WO2015062738. In this context, the disclosure of WO2015062738 is included herewith by reference.

[0293] In particularly preferred embodiments, the artificial nucleic acid may be modified, wherein the G/C content of the at least one coding sequence may be optimized compared to the G/C content of the corresponding wild type or reference coding sequence (herein referred to as “G/C optimized coding sequence”). “Optimized” in that context refers to a coding sequence wherein the G/C content is preferably increased to the essentially highest possible G/C content. The generation of a G/C content optimized nucleic acid sequence may be carried out using a method according to WO2002098443. In this context, the disclosure of WO2002098443 is included in its full scope in the present invention. G/C optimized coding sequences are indicated by the abbreviations “opt1” or “opt11”.

[0294] In preferred embodiments, the artificial nucleic acid may be modified, wherein the codons in the at least one coding sequence may be adapted to human codon usage (herein referred to as “human codon usage adapted coding sequence”). Codons encoding the same amino acid occur at different frequencies in humans. Accordingly, the coding sequence of the nucleic acid is preferably modified such that the frequency of the codons encoding the same amino acid corresponds to the naturally occurring frequency of that codon according to the human codon usage. For example, in the case of the amino acid Ala, the wild type or reference coding sequence is preferably adapted in a way that the codon “GCC” is used with a frequency of 0.40, the codon “GCT” is used with a frequency of 0.28, the codon “GCA” is used with a frequency of 0.22 and the codon “GCG” is used with a frequency of 0.10 etc. (see e.g. Table 2 of published PCT patent application WO2021156267). Accordingly, such a procedure (as exemplified for Ala) is applied for each amino acid encoded by the coding sequence of the nucleic acid to obtain sequences adapted to human codon usage. Human codon usage adapted coding sequences are indicated by the abbreviation “opt3”.

[0295] In preferred embodiments, the artificial nucleic acid may be modified, wherein the G/C content of the at least one coding sequence may be modified compared to the G/C content of the corresponding wild type or reference coding sequence (herein referred to as “G/C modified coding sequence”). In this context, the terms “G/C optimization” or “G/C content modification” relate to a nucleic acid that comprises a modified, preferably an increased number of guanosine and/or cytosine nucleotides as compared to the corresponding wild type or reference coding sequence. Such an increased number may be generated by substitution of codons containing adenosine or thymidine nucleotides by codons containing guanosine or cytosine nucleotides. Advantageously, nucleic acid sequences having an increased G/C content are more stable or show a better expression than sequences having an increased A/U. Preferably, the G/C content of the coding sequence of the nucleic acid is increased by at least 10%, 20%, 30%, preferably by at least 40% compared to the G/C content of the coding sequence of the corresponding wild type or reference nucleic acid sequence (herein referred to as “opt5”).

[0296] In other embodiments, the artificial nucleic acid may be modified, wherein the codon adaptation index (CAI) may be increased or preferably maximised in the at least one coding sequence (herein referred to as “CAI maximized coding sequence”). It is preferred that all codons of the wild type or reference nucleic acid sequence that are relatively rare in e.g. a human are exchanged for a respective codon that is frequent in the e.g. a human, wherein the frequent codon encodes the same amino acid as the relatively rare codon. Suitably, the most frequent codons are used for each amino acid of the encoded protein (see Table 2 of published PCT patent application WO2021156267, most frequent human codons are marked with asterisks). Suitably, the RNA comprises at least one coding sequence, wherein the codon adaptation index (CAI) of the at least one coding sequence is at least 0.5, at least 0.8, at least 0.9 or at least 0.95. Most preferably, the codon adaptation index (CAI) of the at least one coding sequence is 1 (CAI=1). For example, in the case of the amino acid Ala, the wild type or reference coding sequence may be adapted in a way that the most frequent human codon “GCC” is always used for said amino acid. Accordingly, such a procedure (as exemplified for Ala) may be applied for each amino acid encoded by the coding sequence of the nucleic acid to obtain CAI maximized coding sequences (herein referred to as “opt4”).

[0297] In particularly preferred embodiments, the at least one coding sequence of the nucleic acid of the invention is G/C optimized coding sequence.

[0298] In preferred embodiments, at least one coding sequence comprises a nucleic acid sequence encoding an amino acid sequence element A (CBFbeta), wherein the nucleic acid sequence is identical or at least 70%, 80%, 85%, 86%, 87%, 88%, 89%, 90%, 91%, 92%, 93%, 94%, 95%, 96%, 97%, 98%, or 99% identical to any one of SEQ ID NOs: 240-245, 302-307, 364-369, 426-431, 488-493, 550-555, 612-617, 674-679, 736-741, or a fragment or a variant of any of these.

[0299] In preferred embodiments, at least one coding sequence comprises a G/C optimized (opt1, opt5, opt11) nucleic acid sequence encoding an amino acid sequence element A (CBFbeta), wherein the nucleic acid sequence is identical or at least 70%, 80%, 85%, 86%, 87%, 88%, 89%, 90%, 91%, 92%, 93%, 94%, 95%, 96%, 97%, 98%, or 99% identical to any one of SEQ ID NOs: 364-369, 426-431, 674-679, 736-741, or a fragment or a variant of any of these.

[0300] In preferred embodiments, at least one coding sequence comprises a G/C optimized (opt1) nucleic acid sequence encoding an amino acid sequence element A (CBFbeta), wherein the nucleic acid sequence is identical or at least 70%, 80%, 85%, 86%, 87%, 88%, 89%, 90%, 91%, 92%, 93%, 94%, 95%, 96%, 97%, 98%, or 99% identical to any one of SEQ ID NOs: 364, 369, 431, or 426, or a fragment or a variant of any of these.

[0301] In particularly preferred embodiments, at least one coding sequence comprises a G/C optimized (opt1) nucleic acid sequence encoding an amino acid sequence element A (CBFbeta), wherein the nucleic acid sequence is identical or at least 70%, 80%, 85%, 86%, 87%, 88%, 89%, 90%, 91%, 92%, 93%, 94%, 95%, 96%, 97%, 98%, or 99% identical to any one of SEQ ID NOs: 369 or 431, or a fragment or a variant of any of these.

[0302] In preferred embodiments, the at least one coding sequence comprises a nucleic acid sequence encoding an amino acid element B (e.g. SMMHC, LifeAct® or NFAT5), wherein the nucleic acid sequence is identical or at least 70%, 80%, 85%, 86%, 87%, 88%, 89%, 90%, 91%, 92%, 93%, 94%, 95%, 96%, 97%, 98%, or 99% identical to any one of SEQ ID NOs: 246-255, 308-317, 370-379, 432-441, 494-503, 556-565, 618-627, 680-689, 742-751, 1523-1540, or a fragment or a variant of any of these.

[0303] In preferred embodiments, at least one coding sequence comprises a G/C optimized (opt1, opt5, opt11) nucleic acid sequence encoding an amino acid sequence element B (e.g. SMMHC, LifeAct® or NFAT5), wherein the nucleic acid sequence is identical or at least 70%, 80%, 85%, 86%, 87%, 88%, 89%, 90%, 91%, 92%, 93%, 94%, 95%, 96%, 97%, 98%, or 99% identical to any one of SEQ ID NOs: 370-379, 432-441, 680-689, 742-751, 1527, 1528, 1529, 1530, 1537, 1538, 1539, 1540, or a fragment or a variant of any of these.

[0304] In more preferred embodiments, at least one coding sequence comprises a G/C optimized (opt1) nucleic acid sequence encoding an amino acid sequence element B (SMMHC), wherein the nucleic acid sequence is identical or at least 70%, 80%, 85%, 86%, 87%, 88%, 89%, 90%, 91%, 92%, 93%, 94%, 95%, 96%, 97%, 98%, or 99% identical to any one of SEQ ID NOs: 370, 375, 432, or 437, or a fragment or a variant of any of these.

[0305] In particularly preferred embodiments, at least one coding sequence comprises a G/C optimized nucleic acid sequence encoding an amino acid sequence element B (SMMHC), wherein the nucleic acid sequence is identical or at least 70%, 80%, 85%, 86%, 87%, 88%, 89%, 90%, 91%, 92%, 93%, 94%, 95%, 96%, 97%, 98%, or 99% identical to any one of SEQ ID NOs: 375 or 437, or a fragment or a variant of any of these.

[0306] According to various preferred embodiments, the artificial nucleic acid of the invention comprises at least one coding sequence encoding at least one RUNX inhibitor, preferably a RUNX trap, wherein the artificial nucleic acid comprises or consists of
[0307] at least one coding sequence encoding an amino acid sequence element A selected or derived from a transcription co-factor of RUNX as defined herein, more preferably selected or derived from CBFbeta as defined herein, wherein the nucleic acid sequence is identical or at least 70%, 80%, 85%, 86%, 87%, 88%, 89%, 90%, 91%, 92%, 93%, 94%, 95%, 96%, 97%, 98%, or 99% identical to any one of SEQ ID NOs: 240-245, 302-307, 364-369, 426-431, 488-493, 550-555, 612-617, 674-679, 736-741, or a fragment or a variant of any of these; and
[0308] at least one coding sequence encoding an amino acid sequence element B cytoplasmic protein as defined herein, preferably selected or derived from a cytoskeletal protein as defined herein, more preferably selected from SMMHC, LifeAct® or NFAT5 as defined herein, wherein the nucleic acid sequence is identical or at least 70%, 80%, 85%, 86%, 87%, 88%, 89%, 90%, 91%, 92%, 93%, 94%, 95%, 96%, 97%, 98%, or 99% identical to any one of SEQ ID NOs: 246-255, 308-317, 370-379, 432-441, 494-503, 556-565, 618-627, 680-689, 742-751, 1523-1540, or a fragment or a variant of any of these;

[0309] Accordingly, in preferred embodiments, the at least one coding sequence comprises or consists of a nucleic acid sequence encoding an transcription factor inhibitor, preferably a RUNX trap (e.g. CBFbeta-SMMHC, CBFbeta-LifeAct® or CBFbeta-NFAT5), that is identical or at least 70%, 80%, 85%, 86%, 87%, 88%, 89%, 90%, 91%, 92%, 93%, 94%, 95%, 96%, 97%, 98%, or 99% identical to any one of the nucleic acid sequences SEQ ID NOs: 293-295, 355-357, 417-419, 479-481, 541-543, 603-605, 665-667, 727-729, 789-791, 1549-1558, or a fragment or a variant of any of these.

[0310] In preferred embodiments, the at least one coding sequence comprises or consists of a G/C optimized (opt1, opt5, opt11) nucleic acid sequence encoding an transcription factor inhibitor, preferably a RUNX trap CBFbeta-SMMHC, that is identical or at least 70%, 80%, 85%, 86%, 87%, 88%, 89%, 90%, 91%, 92%, 93%, 94%, 95%, 96%, 97%, 98%, or 99% identical to any one of the nucleic acid sequences SEQ ID NOs: 418, 480, 728, 790, 1558, or a fragment or a variant of these nucleic acid sequences encoding CBFbeta-SMMHC.

[0311] In preferred embodiments, the at least one coding sequence comprises or consists of a G/C optimized (opt1) nucleic acid sequence encoding a RUNX trap CBFbeta-SMMHC, that is identical or at least 70%, 80%, 85%, 86%, 87%, 88%, 89%, 90%, 91%, 92%, 93%, 94%, 95%, 96%, 97%, 98%, or 99% identical to any one of the nucleic acid sequences SEQ ID NOs: 418 or 480, or a fragment or a variant of these nucleic acid sequences encoding CBFbeta-SMMHC.

[0312] In particularly preferred embodiments, the at least one coding sequence comprises or consists of a G/C optimized (opt1) nucleic acid sequence encoding a RUNX trap CBFbeta-SMMHC, that is identical or at least 90%, 91%, 92%, 93%, 94%, 95%, 96%, 97%, 98%, or 99% identical to any one of the nucleic acid sequences SEQ ID NO: 418, or a fragment or a variant of that nucleic acid sequence encoding CBFbeta-SMMHC.

[0313] In other embodiments, the at least one coding sequence comprises or consists of a G/C optimized (opt1) nucleic acid sequence encoding a RUNX trap (e.g. CBFbeta-Linker-LifeAct), that is identical or at least 90%, 91%, 92%, 93%, 94%, 95%, 96%, 97%, 98%, or 99% identical to any one of the nucleic acid sequences SEQ ID NOs: 419, 481, 1555, 1556, or a fragment or a variant of any of these.

[0314] In other embodiments, the at least one coding sequence comprises or consists of a G/C optimized (opt1) nucleic acid sequence encoding a RUNX trap (e.g. CBFbeta-Linker-NFAT5), that is identical or at least 90%, 91%, 92%, 93%, 94%, 95%, 96%, 97%, 98%, or 99% identical to any one of the nucleic acid sequences SEQ ID NOs: 1549-1552, or a fragment or a variant of any of these.

[0315] In other preferred embodiments, the at least one coding sequence comprises a nucleic acid sequence encoding an amino acid element B (e.g. HIF1alpha), wherein the nucleic acid sequence is identical or at least 70%, 80%, 85%, 86%, 87%, 88%, 89%, 90%, 91%, 92%, 93%, 94%, 95%, 96%, 97%, 98%, or 99% identical to any one of SEQ ID NOs: 257, 319, 381, 443, 505, 567, 629, 691, 753, or a fragment or a variant of any of these.

[0316] Suitably, the at least one coding sequence comprises or consists of at least one nucleic acid sequence encoding a CBFbeta as defined herein and at least one nucleic acid sequence encoding a HIF1alpha fragment as defined herein.

[0317] Accordingly, in preferred embodiments, the at least one coding sequence comprises or consists of a nucleic acid sequence encoding an transcription factor inhibitor, preferably a RUNX inhibitor (e.g. CBFbeta-Linker-HIF1alpha), that is identical or at least 70%, 80%, 85%, 86%, 87%, 88%, 89%, 90%, 91%, 92%, 93%, 94%, 95%, 96%, 97%, 98%, or 99% identical to any one of the nucleic acid sequences SEQ ID NOs: 296-297, 358-359, 420-421, 482-483, 544-545, 606-607, 668-669, 730-731, 792-793, or a fragment or a variant of any of these.

[0318] In other preferred embodiments, the at least one coding sequence comprises a nucleic acid sequence encoding an amino acid element A (e.g. RUNX1), wherein the nucleic acid sequence is identical or at least 70%, 80%, 85%, 86%, 87%, 88%, 89%, 90%, 91%, 92%, 93%, 94%, 95%, 96%, 97%, 98%, or 99% identical to any one of SEQ ID NOs: 259-277, 321-339, 383-401, 445-463, 507-525, 569-587, 631-649, 693-711, 755-773, or a fragment or a variant of any of these.

[0319] In preferred embodiments, the at least one coding sequence comprises a nucleic acid sequence encoding an amino acid element B (e.g. RUNX1T1a or RUNX1T1b), wherein the nucleic acid sequence is identical or at least 70%, 80%, 85%, 86%, 87%, 88%, 89%, 90%, 91%, 92%, 93%, 94%, 95%, 96%, 97%, 98%, or 99% identical to any one of SEQ ID NOs: 278-292, 340-354, 402-416, 464-478, 526-540, 588-602, 650-664, 712-726, 774-788, or a fragment or a variant of any of these.

[0320] Suitably, the at least one coding sequence comprises or consists of at least one nucleic acid sequence encoding a RUNX fragment as defined herein and at least one nucleic acid sequence encoding a RUNX1T1a fragment as defined herein or a RUNX1T1b fragment as defined herein.

[0321] Accordingly, in preferred embodiments in that context, the at least one coding sequence comprises or consists of a nucleic acid sequence encoding a transcription factor inhibitor, preferably a RUNX inhibitor (RUNX1-RUNX1T1a or RUNX1-RUNX1T1b), that is identical or at least 70%, 80%, 85%, 86%, 87%, 88%, 89%, 90%, 91%, 92%, 93%, 94%, 95%, 96%, 97%, 98%, or 99% identical to any one of the nucleic acid sequences SEQ ID NOs: 298-301, 360-363, 422-425, 484-487, 546-549, 608-611, 670-673, 732-735, 794-797, or a fragment or a variant of any of these.

[0322] In other preferred embodiments, the at least one coding sequence comprises a nucleic acid sequence encoding a transcription factor inhibitor, preferably a RUNX inhibitor (RUNX1 (K83E,R174Q), wherein the nucleic acid sequence is identical or at least 70%, 80%, 85%, 86%, 87%, 88%, 89%, 90%, 91%, 92%, 93%, 94%, 95%, 96%, 97%, 98%, or 99% identical to any one of SEQ ID NOs: 259, 321, 383, 445, 507, 569, 631, 693, 755, or a fragment or a variant of any of these.

[0323] In various preferred embodiments, the at least one coding sequence may comprise a nucleic acid sequence encoding at least one linker peptide, wherein the nucleic acid sequence is identical or at least 70%, 80%, 85%, 86%, 87%, 88%, 89%, 90%, 91%, 92%, 93%, 94%, 95%, 96%, 97%, 98%, or 99% identical to any one of SEQ ID NOs: 258, 320, 382, 444, 506, 568, 630, 692, 754, or a fragment or a variant of any of these. For example, the constructs comprising CBFbeta and LifeAct or the constructs comprising CBFbeta and HIF1alpha or the constructs comprising CBFbeta and NFAT5 may comprise a linker or the constructs comprising CBFbeta and SMMHC may comprise a linker.

[0324] In preferred embodiments, the at least one coding sequence comprises more than one stop codon to allow sufficient termination of translation. In particularly embodiments, the at least one coding sequence comprises two or three stop codon to allow sufficient termination of translation. These more than one stop codons may optionally be positioned in alternative reading frames.

### UTRs:

[0325] In preferred embodiments, the artificial nucleic acid of the invention, preferably the RNA, comprises at least one heterologous untranslated region (UTR). Suitably, the at least one heterologous untranslated region (UTR) can be selected from at least one heterologous 5′-UTR and/or at least one heterologous 3′-UTR.

[0326] The term “untranslated region” or “UTR” or “UTR element” will be recognized and understood by the person of ordinary skill in the art, and are e.g. intended to refer to a part of a nucleic acid molecule typically located 5′ or 3′ of a coding sequence. An UTR is not translated into protein. An UTR may be part of the nucleic acid, e.g. an RNA. An UTR may comprise elements for controlling gene expression, also called regulatory elements. Such regulatory elements may be, e.g., ribosomal binding sites, miRNA binding sites, promotor elements etc.

[0327] In preferred embodiments, the artificial nucleic acid comprises a protein-coding region (“coding sequence” or “cds”), and a 5′-UTR and/or 3′-UTR. Notably, UTRs may harbour regulatory sequence elements that determine RNA turnover, stability, and localization. Moreover, UTRs may harbour sequence elements that enhance translation. In medical applications, translation of the nucleic acid into at least one peptide or protein is of paramount importance to therapeutic efficacy. Certain combinations of 3′-UTRs and/or 5′-UTRs may enhance the expression of operably linked coding sequences encoding peptides or proteins as defined herein. Nucleic acid molecules harbouring said UTR combinations advantageously enable rapid and transient expression of encoded transcription factor inhibitors after administration to a subject, preferably after ocular administration. Accordingly, the nucleic acid of the invention comprising certain combinations of 3′-UTRs and/or 5′-UTRs is particularly suitable for ocular administration.

[0328] Suitably, the artificial nucleic acid comprises at least one heterologous 5′-UTR and/or at least one heterologous 3′-UTR. Said heterologous 5′-UTRs or 3′-UTRs may be derived from naturally occurring genes or may be synthetically engineered. In preferred embodiments, the artificial nucleic acid comprises at least one coding sequence as defined herein operably linked to at least one (heterologous) 3′-UTR and/or at least one (heterologous) 5′-UTR.

[0329] In preferred embodiments, the artificial nucleic acid of the invention comprises at least one 3′-UTR.

[0330] The term “3′-untranslated region” or “3′-UTR” will be recognized and understood by the person of ordinary skill in the art, and are e.g. intended to refer to a part of an RNA molecule located 3′ (i.e. downstream) of a coding sequence and which is not translated into protein. A 3′-UTR may be part of a nucleic acid located between a coding sequence and an (optional) terminal poly(A) sequence. A 3′-UTR may comprise elements for controlling gene expression, also called regulatory elements. Such regulatory elements may be, e.g., ribosomal binding sites, miRNA binding sites etc.

[0331] Preferably, the artificial nucleic acid comprises at least one 3′-UTR, which may be derivable from a gene that relates to an RNA with enhanced half-life (i.e. that provides a stable RNA).

[0332] In some embodiments, the 3′-UTR comprises one or more of a polyadenylation signal, a binding site for proteins that affect a nucleic acid stability of location in a cell, or one or more miRNA or binding sites for miRNAs.

[0333] MicroRNAs (or miRNA) are 19-25 nucleotide long noncoding RNAs that bind to the 3′-UTR of RNA molecules and down-regulate gene expression either by reducing RNA stability or by inhibiting translation. E.g., microRNAs are known to regulate RNA, and thereby protein expression, e.g. in liver (miR-122), heart (miR-Id, miR-149), endothelial cells (miR-17-92, miR-126), adipose tissue (let-7, miR-30c), kidney (miR-192, miR-194, miR-204), myeloid cells (miR-142-3p, miR-142-5p, miR-16, miR-21, miR-223, miR-24, miR-27), muscle (miR-133, miR-206, miR-208), and lung epithelial cells (let-7, miR-133, miR-126). The RNA may comprise one or more microRNA target sequences, microRNA sequences, or microRNA seeds. Such sequences may correspond to any known microRNA, e.g. to those taught in US20050261218 and US20050059005.

[0334] Accordingly, miRNA, or binding sites for miRNAs as defined above may be removed from the 3′-UTR or may be introduced into the 3′-UTR in order to tailor the expression of the nucleic acid to desired cell types or tissues (e.g. eye cells).

[0335] In preferred embodiments, the artificial nucleic acid comprises at least one 3′-UTR, wherein the at least one 3′-UTR comprises or consists of a nucleic acid sequence derived or selected from a 3′-UTR of a gene selected from PSMB3, ALB7, alpha-globin, CASP1, COX6B1, GNAS, NDUFA1 and RPS9, or from a homolog, a fragment, or variant of any one of these genes.

[0336] In preferred embodiments, the at least one 3′-UTR that is derived or selected from PSMB3, ALB7, alpha-globin, CASP1, COX6B1, GNAS, NDUFA1 or RPS9 comprises or consist of a nucleic acid sequence being identical or at least 70%, 80%, 85%, 86%, 87%, 88%, 89%, 90%, 91%, 92%, 93%, 94%, 95%, 96%, 97%, 98%, or 99% identical to any one of SEQ ID NOs: 67-90, 109-120, or a fragment or a variant of any of these.

[0337] In particularly preferred embodiments, the artificial nucleic acid comprises a 3′-UTR derived or selected from a PSMB3 gene.

[0338] In other embodiments, the at least one 3′-UTR comprises or consist of a nucleic acid sequence being identical or at least 70%, 80%, 85%, 86%, 87%, 88%, 89%, 90%, 91%, 92%, 93%, 94%, 95%, 96%, 97%, 98%, or 99% identical to any one of SEQ ID NOs: 91-108, or a fragment or a variant of any of these.

[0339] In other embodiments, the artificial nucleic acid comprises a 3′-UTR as described in WO2016107877, the disclosure of WO2016107877 relating to 3′-UTR sequences herewith incorporated by reference. Suitable 3′-UTRs are SEQ ID NOs: 1-24 and SEQ ID NOs: 49-318 of WO2016107877, or fragments or variants of these sequences. In other embodiments, the artificial nucleic acid comprises a 3′-UTR as described in WO2017036580, the disclosure of WO2017036580 relating to 3′-UTR sequences herewith incorporated by reference. Suitable 3′-UTRs are SEQ ID NOs: 152-204 of WO2017036580, or fragments or variants of these sequences. In other embodiments, the artificial nucleic acid comprises a 3′-UTR as described in WO2016022914, the disclosure of WO2016022914 relating to 3′-UTR sequences herewith incorporated by reference. Particularly preferred 3′-UTRs are nucleic acid sequences according to SEQ ID NOs: 20-36 of WO2016022914, or fragments or variants of these sequences.

[0340] In preferred embodiments, the artificial nucleic acid of the invention comprises at least one 5′-UTR.

[0341] The terms “5′-untranslated region” or “5′-UTR” will be recognized and understood by the person of ordinary skill in the art, and are e.g. intended to refer to a part of a nucleic acid located 5′ (i.e. “upstream”) of a coding sequence and which is not translated into protein. A 5′-UTR may be part of a nucleic acid located 5′ of the coding sequence. Typically, a 5′-UTR starts with the transcriptional start site and ends before the start codon of the coding sequence. A 5′-UTR may comprise elements for controlling gene expression, also called regulatory elements. Such regulatory elements may be, e.g., ribosomal binding sites, miRNA binding sites etc. The 5′-UTR may be modified, e.g. by enzymatic or co-transcriptional addition of a 5′-cap structure (e.g. for mRNA as defined below).

[0342] Preferably, the artificial nucleic acid comprises at least one 5′-UTR, which may be derivable from a gene that relates to an RNA with enhanced half-life (i.e. that provides a stable RNA).

[0343] In some embodiments, the 5′-UTR comprises one or more of a binding site for proteins that affect a nucleic acid stability or nucleic acid location in a cell, or one or more miRNA or binding sites for miRNAs (as defined above).

[0344] Accordingly, miRNA or binding sites for miRNAs as defined above may be removed from the 5′-UTR or introduced into the 5′-UTR in order to tailor the expression of the nucleic acid to desired cell types or tissues (e.g. muscle cells).

[0345] In preferred embodiments, the artificial nucleic acid comprises at least one 5′-UTR, wherein the at least one 5′-UTR comprises a nucleic acid sequence derived or selected from a 5′-UTR of gene selected from HSD17B4, RPL32, ASAH1, ATP5A1, MP68, NDUFA4, NOSIP, RPL31, SLC7A3, TUBB4B, and UBQLN2, or from a homolog, a fragment or variant of any one of these genes,

[0346] In preferred embodiments, the at least one 5′-UTR derived or selected from HSD17B4, RPL32, ASAH1, ATP5A1, MP68, NDUFA4, NOSIP, RPL31, SLC7A3, TUBB4B, and UBQLN2 comprises or consist of a nucleic acid sequence being identical or at least 70%, 80%, 85%, 86%, 87%, 88%, 89%, 90%, 91%, 92%, 93%, 94%, 95%, 96%, 97%, 98%, or 99% identical to any one of SEQ ID NOs: 1-32, 65-66, or a fragment or a variant of any of these.

[0347] In particularly preferred embodiments, the nucleic acid comprises a 5′-UTR derived or selected from a HSD17B4 gene.

[0348] In other embodiments, the at least one 3′-UTR comprises or consist of a nucleic acid sequence being identical or at least 70%, 80%, 85%, 86%, 87%, 88%, 89%, 90%, 91%, 92%, 93%, 94%, 95%, 96%, 97%, 98%, or 99% identical to any one of SEQ ID NOs: 33-64, or a fragment or a variant of any of these.

[0349] In other embodiments, the nucleic acid comprises a 5′-UTR as described in WO2013143700, the disclosure of WO2013143700 relating to 5′-UTR sequences herewith incorporated by reference. Particularly preferred 5′-UTRs are nucleic acid sequences derived from SEQ ID NOs: 1-1363, SEQ ID NO: 1395, SEQ ID NO: 1421 and SEQ ID NO: 1422 of WO2013143700, or fragments or variants of these sequences. In other embodiments, the nucleic acid comprises a 5′-UTR as described in WO2016107877, the disclosure of WO2016107877 relating to 5′-UTR sequences herewith incorporated by reference. Particularly preferred 5′-UTRs are nucleic acid sequences according to SEQ ID NOs: 25-30 and SEQ ID NOs: 319-382 of WO2016107877, or fragments or variants of these sequences. In other embodiments, the nucleic acid comprises a 5′-UTR as described in WO2017036580, the disclosure of WO2017036580 relating to 5′-UTR sequences herewith incorporated by reference. Particularly preferred 5′-UTRs are nucleic acid sequences according to SEQ ID NOs: 1-151 of WO2017036580, or fragments or variants of these sequences. In other embodiments, the nucleic acid comprises a 5′-UTR as described in WO2016022914, the disclosure of WO2016022914 relating to 5′-UTR sequences herewith incorporated by reference. Particularly preferred 5′-UTRs are nucleic acid sequences according to SEQ ID NOs: 3-19 of WO2016022914, or fragments or variants of these sequences.

[0350] In preferred embodiments, the artificial nucleic acid, preferably the RNA of the invention comprises at least one coding sequence as specified herein encoding at least one transcription factor inhibitor, operably linked to a 3′-UTR and/or a 5′-UTR selected from the following 5′-UTR/3′-UTR combinations (“also referred to UTR designs”): a-1 (HSD17B4/PSMB3), a-2 (NDUFA4/PSMB3), a-3 (SLC7A3/PSMB3), a-4 (NOSIP/PSMB3), a-5 (MP68/PSMB3), b-1 (UBQLN2/RPS9), b-2 (ASAH1/RPS9), b-3 (HSD17B4/RPS9), b-4 (HSD17B4/CASP1), b-5 (NOSIP/COX6B1), c-1 (NDUFA4/RPS9), c-2 (NOSIP/NDUFA1), c-3 (NDUFA4/COX6B1), c-4 (NDUFA4/NDUFA1), c-5 (ATP5A1/PSMB3), d-1 (Rpl31/PSMB3), d-2 (ATP5A1/CASP1), d-3 (SLC7A3/GNAS), d-4 (HSD17B4/NDUFA1), d-5 (Slc7a3/Ndufa1), e-1 (TUBB4B/RPS9), e-2 (RPL31/RPS9), e-3 (MP68/RPS9), e-4 (NOSIP/RPS9), e-5 (ATP5A1/RPS9), e-6 (ATP5A1/COX6B1), f-1 (ATP5A1/GNAS), f-2 (ATP5A1/NDUFA1), f-3 (HSD17B4/COX6B1), f-4 (HSD17B4/GNAS), f-5 (MP68/COX6B1), g-1 (MP68/NDUFA1), g-2 (NDUFA4/CASP1), g-3 (NDUFA4/GNAS), g-4 (NOSIP/CASP1), g-5 (RPL31/CASP1), h-1 (RPL31/COX6B1), h-2 (RPL31/GNAS), h-3 (RPL31/NDUFA1), h-4 (Slc7a3/CASP1), h-5 (SLC7A3/COX6B1), i-1 (SLC7A3/RPS9), i-2 (RPL32/ALB7), i-2 (RPL32/ALB7), or i-3 (alpha-globin gene).

[0351] In preferred embodiments, the at least one heterologous 5′-UTR is selected from HSD17B4 and the at least one heterologous 3′ UTR is selected from PSMB3.

[0352] Accordingly, in particularly preferred embodiments, the artificial nucleic acid, preferably the RNA comprises at least one coding sequence as defined herein encoding at least one transcription factor inhibitor as defined herein, wherein said coding sequence is operably linked to a HSD17B4 5′-UTR and a PSMB3 3′-UTR (HSD17B4/PSMB3 (a-1)). It has been shown by the inventors that this embodiment is particularly beneficial for expressing the transcription factor inhibitor in human cells e.g. cells of the eye.

[0353] Preferably, the at least one heterologous 3′-UTR, preferably the 3′-UTR derived or selected from PSMB3, comprises or consist of a nucleic acid sequence being identical or at least 70%, 80%, 85%, 86%, 87%, 88%, 89%, 90%, 91%, 92%, 93%, 94%, 95%, 96%, 97%, 98%, or 99% identical to any one of SEQ ID NOs: 67, 68, 109-120, or a fragment or a variant thereof, preferably SEQ ID NO: 68, or a fragment or a variant thereof.

[0354] Preferably, the at least one heterologous 5′-UTR, preferably the 5′-UTR derived or selected from HSD17B4, comprises or consists of a nucleic acid sequence being identical or at least 70%, 80%, 85%, 86%, 87%, 88%, 89%, 90%, 91%, 92%, 93%, 94%, 95%, 96%, 97%, 98%, or 99% identical to any one of SEQ ID NOs: 1, 2, 65, 66, or a fragment or a variant thereof, preferably SEQ ID NO: 2, or a fragment or a variant thereof.

[0355] In various embodiments, the nucleic acid, e.g. the RNA is monocistronic, bicistronic, or multicistronic.

[0356] In preferred embodiments, the nucleic acid, e.g. the RNA of the invention is monocistronic.

[0357] The term “monocistronic” will be recognized and understood by the person of ordinary skill in the art, and is e.g. intended to refer to a nucleic acid that comprises only one coding sequence. The terms “bicistronic”, or “multicistronic” as used herein are e.g. intended to refer to an RNA that comprises two (bicistronic) or more (multicistronic) coding sequences.

[0358] In preferred embodiments, the A/U (A/T) content in the environment of the ribosome binding site of the nucleic acid is increased compared to the A/U (A/T) content in the environment of the ribosome binding site of its respective wild type or reference nucleic acid. This modification increases the efficiency of ribosome binding to the nucleic acid, which is in turn beneficial for an efficient translation of the nucleic acid into peptides or proteins.

[0359] Accordingly, in a particularly preferred embodiment, the artificial nucleic acid comprises a ribosome binding site, also referred to as “Kozak sequence” identical to or at least 80%, 85%, 90%, 95% identical to any one of SEQ ID NOS: 128, 129, or sequences GCCGCCACC (DNA), GCCGCCACC (RNA), GCCACC (DNA), GCCACC (RNA), ACC (DNA) or ACC (RNA), or fragments or variants of any of these. In preferred embodiments, the “Kozak sequence” comprises or consists of RNA sequence ACC.

### Poly(N) Sequences, Histone Stem Loops:

[0360] In preferred embodiments, the artificial nucleic acid comprises at least one poly(N) sequence, e.g. at least one poly(A) sequence, at least one poly(U) sequence, at least one poly(C) sequence, or combinations thereof.

[0361] In preferred embodiments, the artificial nucleic acid, e.g. the RNA, comprises at least one poly(A) sequence. In some embodiments, the artificial nucleic acid comprises least two, three, or more poly(A) sequences.

[0362] The terms “poly(A) sequence”, “poly(A) tail” or “3′-poly(A) tail” as used herein will be recognized and understood by the person of ordinary skill in the art, and are e.g. intended to be a sequence of adenosine nucleotides, typically located at the 3′-end of a linear RNA of up to about 1000 adenosine nucleotides. Preferably, said poly(A) sequence is essentially homopolymeric, e.g. a poly(A) sequence of e.g. 100 adenosine nucleotides has essentially the length of 100 nucleotides. In other embodiments, the poly(A) sequence is interrupted by at least one nucleotide different from an adenosine nucleotide, e.g. a poly(A) sequence of e.g. 100 adenosine nucleotides may have a length of more than 100 nucleotides (comprising 100 adenosine nucleotides and in addition said at least one nucleotide- or a stretch of nucleotides—different from an adenosine nucleotide).

[0363] In preferred embodiments, the at least one poly(A) sequence may comprise about 40 to about 500 adenosine nucleotides, about 40 to about 250 adenosine nucleotides, about 60 to about 250 adenosine nucleotides, preferably about 60 to about 150 adenosine nucleotides.

[0364] In preferred embodiments, the at least one poly(A) sequence may comprise about 40 to about 500 consecutive adenosine nucleotides, about 40 to about 250 consecutive adenosine nucleotides, about 60 to about 250 consecutive adenosine nucleotides, preferably about 60 to about 150 consecutive adenosine nucleotides.

[0365] Suitably, the length of the poly(A) sequence may be at least about or even more than about 10, 50, 64, 75, 100, 200, 300, 400, or 500 adenosine nucleotides, preferably consecutive adenosine nucleotides.

[0366] In particularly preferred embodiments, the at least one poly(A) sequence comprises about 100 adenosine nucleotides (A100), preferably about 100 consecutive adenosine nucleotides.

[0367] In further embodiments, the artificial nucleic acid comprises at least one interrupted poly(A) sequence comprising about 100 adenosine nucleotides, wherein the poly(A) sequence is interrupted by non-adenosine nucleotides, preferably by about 10 non-adenosine (N10) nucleotides. In that context, a poly(A) sequence A30-N10-A70 is preferred.

[0368] The poly(A) sequence as defined herein may be located directly at the 3′ terminus of the artificial nucleic acid, preferably the RNA. In preferred embodiments, the 3′-terminal nucleotide (that is the last 3′-terminal nucleotide in the polynucleotide chain) is the 3′-terminal A nucleotide of the at least one poly(A) sequence. The term “directly located at the 3′ terminus” has to be understood as being located exactly at the 3′ terminus-in other words, the 3′ terminus of the nucleic acid consists of a poly(A) sequence terminating with an A.

[0369] Ending on an adenosine nucleotide decreases the induction of interferons, e.g. IFNalpha, by the RNA of the invention if for example administered as a medicament into the eye. This is particularly important as the induction of interferons, e.g. IFNalpha, is thought to be one main factor for induction of side effects.

[0370] Accordingly, in particularly preferred embodiments, the artificial nucleic acid of the invention, e.g. the RNA, comprises a poly(A) sequence of about 100 consecutive adenosine nucleotides, wherein said poly(A) sequence is located directly at the 3′ terminus of the RNA, optionally wherein the 3′ terminal nucleotide is an adenosine

[0371] In preferred embodiments, the poly(A) sequence of the artificial nucleic acid, e.g. the RNA, is obtained from a DNA template during RNA in vitro transcription. In other embodiments, the poly(A) sequence is obtained in vitro by common methods of chemical synthesis without being necessarily transcribed from a DNA template. In other embodiments, poly(A) sequences are generated by enzymatic polyadenylation of the RNA (after RNA in vitro transcription) using e.g. immobilized poly(A) polymerases according to methods and means as described in WO2016174271.

[0372] In some embodiments, the artificial nucleic acid, e.g. the RNA, comprises at least one poly(A) sequence obtained by enzymatic polyadenylation, wherein the majority of RNA molecules comprise about 100 (+/−20) to about 500 (+/−100) adenosine nucleotides, preferably about 100 (+/−20) to about 200 (+/−40) adenosine nucleotides.

[0373] In some embodiments, the artificial nucleic acid, e.g. the RNA, comprises at least one poly(A) sequence derived from a template DNA and additionally at least one poly(A) sequence generated by enzymatic polyadenylation, e.g. as described in published PCT patent application WO2016091391.

[0374] In some embodiments, the artificial nucleic acid comprises at least one polyadenylation signal.

[0375] In some embodiments, the artificial nucleic acid comprises at least one poly(C) sequence. A poly(C) sequence in the context of the invention may be located in an UTR region, preferably in the 3′ UTR.

[0376] The term “poly(C) sequence” as used herein is intended to be a sequence of cytosine nucleotides of up to about 200 cytosine nucleotides. In preferred embodiments, the poly(C) sequence comprises about 10 to about 200 cytosine nucleotides, about 10 to about 100 cytosine nucleotides, about 20 to about 70 cytosine nucleotides, about 20 to about 60 cytosine nucleotides, or about 10 to about 40 cytosine nucleotides. In a particularly preferred embodiment, the poly(C) sequence comprises about 30 cytosine nucleotides.

[0377] Accordingly, in preferred embodiments, the artificial nucleic acid of the invention comprises at least one poly(C) sequence and/or at least one miRNA binding site and/or histone stem-loop sequence.

[0378] In preferred embodiments, the artificial nucleic acid, e.g. the RNA, comprises at least one histone stem-loop (hSL) or histone stem loop structure. A hSL in the context of the invention may be located in an UTR region, preferably in the 3′ UTR.

[0379] The term “histone stem-loop” (hSL) is intended to refer to nucleic acid sequences that forms a stem-loop secondary structure predominantly found in histone mRNAs.

[0380] Histone stem-loop sequences/structures may suitably be selected from hSL sequences as disclosed in WO2012019780, the disclosure relating to histone stem-loop sequences/histone stem-loop structures incorporated herewith by reference. A hSL sequence that may be used within the present invention may be derived from formulae (I) or (II) of WO2012019780. According to a preferred embodiment, the artificial nucleic acid, e.g. the RNA, comprises at least one hSL sequence derived from at least one of the specific formulae (Ia) or (IIa) of WO2012019780.

[0381] In preferred embodiments, the artificial nucleic acid, e.g. the RNA, comprises at least one histone stem-loop sequence, wherein said histone stem-loop sequence comprises or consists of a nucleic acid sequence identical or at least 70%, 80%, 90%, 91%, 92%, 93%, 94%, 95%, 96%, 97%, 98%, or 99% identical to any one of SEQ ID NOs: 136 or 137, or a fragment or variant of any of these. Preferably, the histone stem-loop sequence comprises or consists of a nucleic acid sequence according to SEQ ID NO: 137, or a fragment or thereof.

[0382] In other embodiments, the artificial nucleic acid does not comprise a histone stem-loop as defined herein.

[0383] In preferred embodiments, the artificial nucleic acid comprises a 3′-terminal sequence element. The 3′-terminal sequence element represents the 3′ terminus of the RNA. A 3′-terminal sequence element may comprise at least one poly(N) sequence as defined herein and, optionally, at least one hSL as defined herein.

[0384] In preferred embodiments, the artificial nucleic acid comprises at least one 3′-terminal sequence element comprising or consisting of an RNA sequence being identical or at least 70%, 80%, 90%, 91%, 92%, 93%, 94%, 95%, 96%, 97%, 98%, or 99% identical to any one of SEQ ID NOs: 138-172, or a fragment or variant of these sequences.

[0385] In preferred embodiments, the artificial nucleic acid comprises a 3′-terminal sequence element comprising a hSL as defined herein followed by a poly(A) sequence comprising about 100 consecutive adenosines.

[0386] In particularly preferred embodiments, the artificial nucleic acid comprises a 3′-terminal sequence element comprising or consisting of a nucleic acid sequence being identical or at least 70%, 80%, 90%, 91%, 92%, 93%, 94%, 95%, 96%, 97%, 98%, or 99% identical to SEQ ID NO: 144, or a fragment or variant thereof.

[0387] In some embodiments, the artificial nucleic acid comprises a 5′-terminal sequence element comprising or consisting of a nucleic acid sequence, preferably an RNA sequence, being identical or at least 70%, 80%, 90%, 91%, 92%, 93%, 94%, 95%, 96%, 97%, 98%, or 99% identical to any one of sequences GGGAGA, AGGAGA, GGGAAA, AGAAUA, AGAUUA, GAUGGG or GGGCG, or a fragment or variant of these sequences.

[0388] In preferred embodiments, the artificial nucleic acid comprises a 5′-terminal sequence element comprising or consisting of a nucleic acid sequence, preferably an RNA sequence being identical or at least 70%, 80%, 90%, 91%, 92%, 93%, 94%, 95%, 96%, 97%, 98%, or 99% identical to sequence AGGAGA, or a fragment or variant thereof.

[0389] Such a 5′-terminal sequence element may comprise e.g. a binding site for T7 RNA polymerase. Further, the first nucleotide of said 5′-terminal start sequence may preferably comprise a 2′O methylation, e.g. 2′O methylated guanosine or a 2′O methylated adenosine.

[0390] In particularly preferred embodiments, the artificial nucleic acid of the invention is an isolated nucleic acid. The term “isolated nucleic acid” does not comprise a cell or a subject that comprises said nucleic acid, but relates to the artificial nucleic acid as an isolated molecule or ensemble of isolated molecules. For example, the “isolated nucleic acid” can be an artificial nucleic acid isolated or purified from a cell (e.g. cell culture, bacterial culture), or can be an artificial nucleic acid (e.g. RNA) isolated from an RNA in vitro transcription.

[0391] In particularly preferred embodiments, the artificial nucleic acid of the invention is a therapeutic nucleic acid. Accordingly, the artificial nucleic acid is suitably used in a therapeutic context, in particular to provide a therapeutic modality for providing transcription factor inhibitors according to the invention.

[0392] In some embodiments, the artificial nucleic acid of the invention is selected from a DNA.

[0393] The DNA may be any type of DNA that comprises a coding sequence as defined herein including any type of single stranded DNA, any type of double stranded DNA, any type of linear DNA, and any type of circular DNA.

[0394] A suitable DNA in the context of the invention may be selected from bacterial plasmid, an adenovirus, a poxvirus, a parapoxivirus (orf virus), a vaccinia virus, a fowlpox virus, a herpes virus, an adeno-associated virus (AAV), an alphavirus, a lentivirus, a lambda phage, a lymphocytic choriomeningitis virus and a Listeria sp, Salmonella sp.

[0395] In preferred embodiments, the DNA a viral DNA, preferably an adeno-associated virus DNA.

[0396] In particularly preferred embodiments, the artificial nucleic acid of the invention is an RNA.

[0397] The RNA may be any type of RNA that comprises a coding sequence as defined herein including any type of single stranded RNA, any type of double stranded RNA, any type of linear RNA, and any type of circular RNA.

[0398] In preferred embodiments, the RNA is selected from mRNA, circular RNA, replicon RNA or self-replicating RNA, or viral RNA, preferably mRNA or a circular RNA.

[0399] In embodiments, the RNA is a circular RNA. As used herein, “circular RNA” or “circRNAs” have to be understood as an RNA construct that is connected to form a circle and therefore does not comprise a 3′ or 5′ terminus. In preferred embodiments, said circRNA comprises at least one coding sequence encoding at least one transcription factor inhibitor as defined herein.

[0400] In embodiments, the RNA is a replicon RNA. The term “replicon RNA” or “self-replicating RNA” will be recognized and understood by the person of ordinary skill in the art and is preferably intended to be an optimized self-replicating RNA. Such constructs may include replicase elements derived from e.g. alphaviruses (e.g. SFV, SIN, VEE, or RRV) and the substitution of the structural virus proteins with the nucleic acid of interest (that is, the sequence encoding at least one transcription factor inhibitor).

[0401] In particularly preferred embodiments, the RNA is selected from an mRNA. Accordingly, the artificial nucleic acid of the invention is an mRNA, suitably an isolated mRNA.

[0402] mRNA technology is preferred in the context of the invention to produce transcription factor inhibitors because mRNA allows for regulated dosage, transient expression, complete degradation of the mRNA after protein synthesis, and do not pose the risk of insertional mutations.

[0403] Preferably, the artificial nucleic acid, preferably the RNA, comprises about 50 to about 20000 nucleotides, or about 500 to about 10000 nucleotides, or about 1000 to about 10000 nucleotides, or preferably about 1000 to about 5000 nucleotides, or even more preferably about 2000 to about 5000 nucleotides.

### Modified Nucleotides:

[0404] According to various embodiments, the artificial nucleic acid, preferably the RNA, is modified, wherein the modification refers to chemical modifications comprising backbone modifications as well as sugar modifications or base modifications.

[0405] A modified nucleic acid or RNA may comprise nucleotide analogues/modifications, e.g. backbone modifications, sugar modifications or base modifications. A backbone modification in the context of the invention is a modification in which phosphates of the backbone of the nucleotides of the RNA are chemically modified. A sugar modification in the context of the invention is a chemical modification of the sugar of the nucleotides of the RNA. Furthermore, a base modification in the context of the invention is a chemical modification of the base moiety of the nucleotides of the RNA. In this context, nucleotide analogues or modifications are preferably selected from nucleotide analogues which are applicable for transcription and/or translation.

[0406] Accordingly, in preferred embodiments, the nucleic acid, preferably the RNA of the invention comprises at least one modified nucleotide.

[0407] In some embodiments, the at least one modified nucleotide is selected from pseudouridine, N1-methylpseudouridine, N1-ethylpseudouridine, 2-thiouridine, 4′-thiouridine, 5-methylcytosine, 5-methyluridine, 2-thio-1-methyl-1-deaza-pseudouridine, 2-thio-1-methyl-pseudouridine, 2-thio-5-aza-uridine, 2-thio-dihydropseudouridine, 2-thio-dihydrouridine, 2-thio-pseudouridine, 4-methoxy-2-thio-pseudouridine, 4-methoxy-pseudouridine, 4-thio-1-methyl-pseudouridine, 4-thio-pseudouridine, 5-aza-uridine, dihydropseudouridine, 5-methoxyuridine and 2′-O-methyl uridine.

[0408] Particularly preferred in that context are pseudouridine (ψ) and N1-methylpseudouridine (m1ψ).

[0409] In some embodiments, essentially all, e.g. essentially 100% of the uracil in the coding sequence (or the full nucleic acid sequence) have a chemical modification, preferably a chemical modification in the 5-position of the uracil.

[0410] In preferred embodiments, 100% of the uracil in the full nucleic acid sequence, preferably the RNA sequence are substituted with N1-methylpseudouridine (m1ψ). Alternatively, 100% of the uracil in the full nucleic acid sequence, preferably the RNA sequence are substituted with pseudouridine (ψ).

[0411] Incorporating modified nucleotides such as e.g. pseudouridine (ψ) or N1-methylpseudouridine (m1ψ) into the coding sequence (or the full nucleic acid sequence) may be advantageous as unwanted innate immune responses (upon administration of the RNA) may be adjusted or reduced (if required).

[0412] In preferred embodiments, the artificial nucleic acid, preferably the RNA, does not comprise chemically modified nucleotides. Notably, a 5′-cap structure as defined below is typically not considered to be a chemically modified nucleotide. Accordingly, the artificial nucleic acid, preferably the RNA, comprises a sequence that consists only of G, C, A and U nucleotides and therefore does not comprise modified nucleotides, and optionally comprises a 5′-cap structure.

[0413] In preferred embodiments, the artificial nucleic acid, preferably the RNA of the invention does not comprise N1-methylpseudouridine (m1ψ) substituted positions or pseudouridine (ψ) substituted positions.

### Cap Structures:

[0414] In preferred embodiments, the artificial nucleic acid, preferably the RNA, comprises a 5′-cap structure.

[0415] Such a 5′-cap structure suitably stabilizes the nucleic acid and/or enhances expression of the encoded transcription factor inhibitor and/or reduces the stimulation of the innate immune system after administration.

[0416] Accordingly, in preferred embodiments, the artificial nucleic acid, preferably the RNA, comprises a 5′-cap structure, preferably m7G, cap0, cap1, cap2, a modified cap0 or a modified cap1 structure.

[0417] The term “5′-cap structure” as used herein will be recognized and understood by the person of ordinary skill in the art, and is e.g. intended to refer to a 5′ modified nucleotide, particularly a guanine nucleotide, positioned at the 5′-end of an RNA, e.g. an mRNA. Preferably, the 5′-cap structure is connected via a 5′-5′-triphosphate linkage to the RNA.

[0418] 5′-cap structures which may be suitable in the context of the present invention are cap0 (methylation of the first nucleobase, e.g. m7GpppN), cap1 (additional methylation of the ribose of the adjacent nucleotide of m7GpppN), cap2 (additional methylation of the ribose of the 2nd nucleotide downstream of the m7GpppN), cap3 (additional methylation of the ribose of the 3rd nucleotide downstream of the m7GpppN), cap4 (additional methylation of the ribose of the 4th nucleotide downstream of the m7GpppN), ARCA (anti-reverse cap analogue), modified ARCA (e.g. phosphothioate modified ARCA), inosine, N1-methyl-guanosine, 2′-fluoro-guanosine, 7-deaza-guanosine, 8-oxo-guanosine, 2-amino-guanosine, LNA-guanosine, and 2-azido-guanosine.

[0419] Suitably, a 5′-cap (cap0 or cap1) structure may be formed in chemical RNA synthesis or in RNA in vitro transcription (co-transcriptional capping) using cap analogues.

[0420] The term “cap analogue” as used herein will be recognized and understood by the person of ordinary skill in the art, and is e.g. intended to refer to a non-polymerizable di-nucleotide or tri-nucleotide that has cap functionality in that it facilitates translation or localization, and/or prevents degradation of an RNA molecule when incorporated at the 5′-end of the nucleic acid molecule. Non-polymerizable means that the cap analogue will be incorporated only at the 5′-terminus because it does not have a 5′ triphosphate and therefore cannot be extended in the 3′-direction by a template-dependent polymerase, particularly, by template-dependent RNA polymerase. Examples of cap analogues include, but are not limited to, a chemical structure selected from the group consisting of m7GpppG, m7GpppA, m7GpppC; unmethylated cap analogues (e.g. GpppG); dimethylated cap analogue (e.g. m2,7GpppG), trimethylated cap analogue (e.g. m2,2,7GpppG), dimethylated symmetrical cap analogues (e.g. m7Gpppm7G), or anti reverse cap analogues (e.g. ARCA; m7,2′OmeGpppG; m7,2′dGpppG; m7,3′OmeGpppG; m7,3′dGpppG and their tetraphosphate derivatives). Further suitable cap analogues are described in WO2008016473, WO2008157688, WO2009149253, WO2011015347, WO2013059475, WO2017066793, WO2017066781, WO2017066791, WO2017066789, WO2017053297, WO2017066782, WO2018075827 and WO2017066797, the disclosures referring to cap analogues herewith incorporated by reference.

[0421] In embodiments, a cap1 structure is generated using tri-nucleotide cap analogue as disclosed in WO2017053297, WO2017066793, WO2017066781, WO2017066791, WO2017066789, WO2017066782, WO2018075827 and WO2017066797. Preferably, cap structures derivable from the structure disclosed in claim 1-5 of WO2017053297 may be suitably used to co-transcriptionally generate a cap1 structure. Further, any cap structures derivable from the structure defined in claim 1 or claim 21 of WO2018075827 may be suitably used to generate a cap1 structure.

[0422] In preferred embodiments, the 5′-cap structure may suitably be added co-transcriptionally using tri-nucleotide cap analogue as defined herein, preferably in an RNA in vitro transcription reaction as defined herein.

[0423] In particularly preferred embodiments, the artificial nucleic acid, preferably the RNA of the invention comprises a cap1 structure or a modified cap1 structure.

[0424] In preferred embodiments, the cap1 structure is formed via co-transcriptional capping using tri-nucleotide cap analogues m7G(5′)ppp(5′)(2′OMeA)pG or m7G(5′)ppp(5′)(2′OMeG)pG. A particularly preferred cap1 analog in that context is m7G(5′)ppp(5′)(2′OMeA)pG.

[0425] In other preferred embodiments, the cap1 structure is a modified cap1 structure and is formed using co-transcriptional capping using tri-nucleotide cap analogue 3′OMe-m7G(5′)ppp(5′)(2′OMeA)pG.

[0426] In other embodiments, the 5′-cap structure is formed via enzymatic capping using capping enzymes (e.g. vaccinia virus capping enzymes and/or cap-dependent 2′-O methyltransferases) to generate cap0 or cap1 or cap2 structures. In that context, the 5′-cap structure (cap0 or cap1) may be added using immobilized capping enzymes and/or cap-dependent 2′-O methyltransferases using methods and means disclosed in published PCT patent application WO2016193226.

[0427] In preferred embodiments, about 70%, 75%, 80%, 85%, 90%, 95% of the RNA (species) comprises a cap structure, preferably a cap1 structure as determined by a capping assay.

[0428] For determining the presence or absence of a cap structure, capping assays as described in published PCT application WO2015101416, in particular, as described in claims 27 to 46 of published PCT application WO2015101416 can be used. Other capping assays that may be used to determine the presence or absence of a cap structure of an RNA are described in published PCT application WO2020127959.

### Further RNA Features:

[0429] In the context of the invention, the artificial nucleic acid is preferably an RNA that provides at least one coding sequence encoding at least one transcription factor inhibitor as defined herein that is produced after administration to a cell or subject.

[0430] Suitable elements the RNA of the invention preferably comprises are for example a 5′ Cap structure as defined herein, a 5′ UTR as defined herein, a 3′ UTR as defined herein, hSL as defined herein, Poly(A) sequence as defined herein, and optional chemical modifications as defined herein.

[0431] In preferred embodiments, the RNA is preferably an in vitro transcribed RNA (e.g. an in vitro transcribed mRNA).

[0432] In some embodiments, the nucleotide mixture for RNA in vitro transcription comprises modified nucleotides as defined herein. In that context, preferred modified nucleotides may be selected from pseudouridine (ψ) or N1-methylpseudouridine (m1ψ. Suitably, uracil nucleotides in the nucleotide mixture are replaced (either partially or completely) by pseudouridine (ψ) and/or N1-methylpseudouridine (m1ψ) to obtain a modified RNA (e.g. a modified mRNA).

[0433] In preferred embodiments, the nucleotide mixture used in RNA in vitro transcription does not comprise modified nucleotides as defined herein. In preferred embodiments, the nucleotide mixture used for RNA in vitro transcription does only comprise G, C, A and U nucleotides, and, optionally, a cap analog as defined herein to obtain a non-modified RNA (e.g. a non-modified mRNA).

[0434] In preferred embodiments, the nucleotide mixture (i.e. the fraction of each nucleotide in the mixture) used for RNA in vitro transcription reactions is optimized for the given RNA sequence, preferably as described WO2015188933.

[0435] Accordingly, in preferred embodiments, the nucleic acid of the invention is an in vitro transcribed RNA, preferably wherein RNA in vitro transcription has been performed in the presence of a sequence optimized nucleotide mixture.

[0436] In a preferred embodiment, the RNA is lyophilized (e.g. according to WO2016165831 or WO2011069586) to yield a temperature stable dried RNA. The RNA may also be dried using spray-drying or spray-freeze drying (e.g. according to WO2016184575 or WO2016184576) to yield a temperature stable RNA (powder).

[0437] In the context of the invention (e.g. for RNA-based medicaments), it may be required to provide GMP-grade RNA. GMP-grade RNA is produced using a manufacturing process approved by regulatory authorities. In preferred embodiments, RNA production is performed under current good manufacturing practice (GMP), implementing various quality control steps on DNA and RNA level, preferably quality control steps selected from methods described in WO2016180430. In preferred embodiments, the RNA of the invention is a GMP-grade RNA, particularly a GMP-grade mRNA.

[0438] In preferred embodiments, the artificial nucleic acid of the invention is a purified RNA, preferably a purified mRNA. Suitably, the RNA of the invention has been purified by at least one step of purification

[0439] The term “purified RNA” or “purified mRNA” as used herein has to be understood as RNA which has a higher purity after certain purification steps (e.g. HPLC, TFF, Oligo d (T) purification, precipitation steps) than the starting material (e.g. in vitro transcribed RNA). Typical impurities that are essentially not present in purified RNA comprise peptides or proteins (e.g. enzymes derived from DNA dependent RNA in vitro transcription, e.g. RNA polymerases, RNases, pyrophosphatase, restriction endonuclease, DNase), spermidine, BSA, abortive RNA sequences, RNA fragments (short double stranded RNA (dsRNA)), free nucleotides (modified nucleotides, conventional NTPs, cap analogue), template DNA fragments, buffer components (HEPES, TRIS, MgCl2) etc. Other potential impurities that may be derived from e.g. fermentation procedures comprise bacterial impurities (bioburden, bacterial DNA) or impurities derived from purification procedures (organic solvents etc.). Accordingly, it is desirable in this regard for the “degree of RNA purity” to be as close as possible to 100%. Accordingly, “purified RNA” as used herein has a degree of purity of more than 75%, 80%, 85%, very particularly 90%, 91%, 92%, 93%, 94%, 95%, 96%, 97%, 98% and most favourably 99% or more. The degree of purity is e.g. determined by an analytical HPLC, wherein the percentages provided above correspond to the ratio between the area of the peak for the target RNA and the total area of all peaks including the peaks representing the by-products. Alternatively, the degree of purity is e.g. determined by an analytical agarose gel electrophoresis or capillary gel electrophoresis.

[0440] In preferred embodiments, purification of the nucleic acid, preferably the RNA may comprise at least one step of purification selected from (RP)-HPLC, AEX, size exclusion chromatography (SEC), hydroxyapatite chromatography, tangential flow filtration (TFF), filtration, precipitation, core-bead flow through chromatography, oligo(dT) purification, cellulose-based purification, or any combination thereof.

[0441] Preferably, the RNA has been purified using RP-HPLC (preferably as described in WO2008077592) and/or TFF (preferably as described in WO2016193206) and/or oligo d (T) purification (preferably as described in WO2016180430) to e.g. to remove dsRNA, non-capped RNA and/or RNA fragments.

[0442] In some embodiments, the RNA has been purified by a step of 5′ dephosphorylation of linear RNA, DNA digestion, protein digestion, and/or dsRNA digestion.

[0443] According to preferred embodiments, the purified RNA has a purity level of at least about 70%, 75%, 80%, 85%, 90%, or 95%, preferably more than 95%. Suitably, the degree of purity is determined by an analytical HPLC method.

[0444] In embodiments, the nucleic acid, preferably the RNA of the invention has a certain integrity.

[0445] The term “integrity” generally describes whether the complete nucleic acid sequence or RNA sequence is present. Low RNA integrity could be due to, amongst others, RNA degradation, RNA cleavage, incorrect or incomplete chemical synthesis of the RNA, incorrect base pairing, integration of modified nucleotides or the modification of already integrated nucleotides, lack of capping or incomplete capping, lack of polyadenylation or incomplete polyadenylation, or incomplete RNA in vitro transcription. RNA is a fragile molecule that can easily degrade, which may be caused e.g. by temperature, ribonucleases, pH or other factors (e.g. nucleophilic attacks, hydrolysis etc.), which may reduce the RNA integrity and, consequently, its functionality.

[0446] The skilled person can choose from a variety of different chromatographic or electrophoretic methods for determining integrity of nucleic acid, in particular RNA. Chromatographic and electrophoretic (e.g. capillary gel electrophoresis) methods are well-known in the art. In case chromatography is used (e.g. RP-HPLC), the analysis of the integrity of the RNA may be based on determining the peak area (or “area under the peak”) of the expected full length RNA (the RNA with the correct RNA length) in a corresponding chromatogram.

[0447] In embodiments, the nucleic acid of the invention, preferably the RNA has an integrity ranging from about 40% to about 100%. In embodiments, the nucleic acid of the invention, preferably the RNA has an integrity of about 50%, about 60%, about 70%, about 80%, or about 90%. Integrity is suitably determined using analytical HPLC, preferably analytical RP-HPLC.

[0448] In preferred embodiments, the nucleic acid of the invention, preferably the RNA has an integrity of at least about 50%, preferably of at least about 60%, more preferably of at least about 70%, most preferably of at least about 80% or about 90% or higher. Integrity is suitably determined using analytical HPLC, preferably analytical RP-HPLC.

[0449] In preferred embodiments, the nucleic acid, preferably the RNA, is suitable for use in treatment or prevention of a disease, disorder or condition.

[0450] In particularly preferred embodiments, the nucleic acid, preferably the RNA, is suitable for use in treatment or prevention of an ocular disease, disorder or condition.

### Preferred Nucleic Acid Constructs:

[0451] In various embodiments, the artificial nucleic acid comprises at least the following elements:
[0452] A) a 5′-cap structure, preferably as specified herein;
[0453] B) at least one cds encoding at least one transcription factor inhibitor as defined herein;
[0454] C) a 5′-UTR and/or a 3′-UTR, preferably as specified herein;
[0455] D) at least one poly(A) sequence, preferably as specified herein.

[0456] In preferred embodiments, the artificial nucleic acid, preferably the RNA, comprises the following sequence elements preferably in 5′- to 3′-direction:
[0457] A) a 5′-cap structure;
[0458] B) a 5′-UTR preferably selected or derived from a 5′-UTR of a HSD17B4 gene;
[0459] C) a coding sequence encoding a transcription factor inhibitor, preferably a RUNX inhibitor;
[0460] D) a 3′-UTR preferably selected or derived from a 3′-UTR of a PSMB3 gene;
[0461] E) optionally, a histone stem-loop; and
[0462] F) a poly(A) sequence preferably comprising about 100 A nucleotides.

[0463] In various embodiments, the artificial nucleic acid, preferably the RNA, comprises the following elements:
[0464] A) a 5′-cap structure, preferably as specified herein;
[0465] B) a 5′-terminal start element, preferably as specified herein;
[0466] C) optionally, a 5′-UTR, preferably as specified herein;
[0467] D) a ribosome binding site, preferably as specified herein;
[0468] E) at least one cds encoding at least one transcription factor inhibitor as defined herein.
[0469] F) a 3′-UTR, preferably as specified herein;
[0470] G) optionally, at least one poly(A) sequence, preferably as specified herein;
[0471] H) optionally, at least one poly(C) sequence, preferably as specified herein;
[0472] I) optionally, histone stem-loop preferably as specified herein;
[0473] J) optionally, 3′-terminal sequence element, preferably as specified herein;
[0474] K) optionally, chemically modified nucleotides, preferably as specified herein.

[0475] In preferred embodiments, the artificial nucleic acid, preferably the RNA comprises the following elements preferably in 5′- to 3′-direction:
[0476] A) a cap1 structure preferably as defined herein;
[0477] B) a 5′-UTR derived from a HSD17B4 gene as defined herein;
[0478] C) at least one cds encoding at least one transcription factor inhibitor as defined herein.
[0479] D) a 3′-UTR derived from a 3′-UTR of a PSMB3 gene as defined herein;
[0480] E) a poly(A) sequence preferably comprising about 100 A nucleotides;
[0481] F) optionally, chemically modified nucleotides, suitably selected from ψ or m1ψ, wherein m1ψ is preferred

[0482] In particularly preferred embodiments, the mRNA comprises the following elements in 5′- to 3′-direction:
[0483] A) a cap1 structure as defined herein;
[0484] B) a 5′-UTR derived from a HSD17B4 gene as defined herein;
[0485] C) at least one cds encoding at least one transcription factor inhibitor as defined herein.
[0486] D) a 3′-UTR derived from a 3′-UTR of a PSMB3 gene as defined herein;
[0487] E) a histone stem-loop as defined herein;
[0488] F) a poly(A) sequence comprising about 100 A nucleotides, preferably representing the 3′ terminus;
[0489] G) optionally, chemically modified nucleotides, suitably selected from ψ or m1ψ, wherein m1ψ is preferred.

[0490] Preferred nucleic acid, preferably RNA sequences of the invention are provided in Table 3. Therein, each row represents a specific suitable RNA construct of the invention (compare with Table 2), wherein the description of the transcription factor inhibitor construct is indicated in column A and the SEQ ID NOs of the amino acid sequence of the respective transcription factor inhibitor construct is provided in column B. The corresponding SEQ ID NOs of the coding sequences encoding the respective transcription factor inhibitor constructs are provided in Table 2. Further information is provided under “feature key”, i.e. “source” (for nucleic acids or proteins) or “misc_feature” (for nucleic acids) or “REGION” (for proteins) of the respective SEQ ID NOs in the ST.26 sequence listing. The corresponding RNA sequences, in particular mRNA sequences comprising preferred coding sequences are provided in columns C-F, wherein column C provides RNA sequences with an UTR combination “HSD17B4/PSMB3” and a 3′ terminal A100 tail, column D provides nucleic acid sequences with an UTR combination “HSD17B4/PSMB3” and 3′ terminal hSL-A100 tail, column E provides RNA sequences with an UTR combination “HSD17B4/PSMB3” and a 3′ terminal A100-N5 tail, column F provides nucleic acid sequences with an UTR combination “HSD17B4/PSMB3” and 3′ terminal hSL-A100-N5 tail.

TABLE 3
RNA sequences encoding transcription factor inhibitors:

| row | A | B | C | D | E | F |
|---|---|---|---|---|---|---|
| 1 | CBFbeta(1-165)-SMMHC(1527- | 232 | 980, 990, | 800, 810, | 1340, 1350, | 1160, 1170, |
| | 1877) | | 1000, 1010, | 820, 830, | 1360, 1370, | 1180, 1190, |
| | (CBFbeta-SMMHCΔC95) | | 1020, 1030, | 840, 850, | 1380, 1390, | 1200, 1210, |
| | | | 1040, 1050, | 860, 870, | 1400, 1410, | 1220, 1230, |
| | | | 1060, 1070, | 880, 890, | 1420, 1430, | 1240, 1250, |
| | | | 1080, 1090, | 900, 910, | 1440, 1450, | 1260, 1270, |
| | | | 1100, 1110, | 920, 930, | 1460, 1470, | 1280, 1290, |
| | | | 1120, 1130, | 940, 950, | 1480, 1490, | 1300, 1310, |
| | | | 1140, 1150 | 960, 970, | 1500, 1510 | 1320, 1330 |
| | | | | 1567, 1568, | | |
| | | | | 1577, 1578- | | |
| | | | | 1582 | | |
| 2 | CBFbeta(1-165)-SMMHC(1527- | 231 | 979, 989, | 799, 809, | 1339, 1349, | 1159, 1169, |
| | 1927) | | 999, 1009, | 819, 829, | 1359, 1369, | 1179, 1189, |
| | | | 1019, 1029, | 839, 849, | 1379, 1389, | 1199, 1209, |
| | | | 1039, 1049, | 859, 869, | 1399, 1409, | 1219, 1229, |
| | | | 1059, 1069, | 879, 889, | 1419, 1429, | 1239, 1249, |
| | | | 1079, 1089, | 899, 909, | 1439, 1449, | 1259, 1269, |
| | | | 1099, 1109, | 919, 929, | 1459, 1469, | 1279, 1289, |
| | | | 1119, 1129, | 939, 949, | 1479, 1489, | 1299, 1309, |
| | | | 1139, 1149 | 959, 969 | 1499, 1509 | 1319, 1329 |
| 3 | CBFbeta(1-141)-SMMHC(1527- | 1545 | | 1563, 1573 | | |
| | 1877) | | | | | |
| 4 | CBFbeta(1-130)-Linker-Linker- | 1546 | | 1564, 1574 | | |
| | SMMHC(1527-1877) | | | | | |
| 5 | CBFbeta(1-165)-Linker-LifeAct | 233 | 981, 991, | 801, 811, | 1341, 1351, | 1161, 1171, |
| | | | 1001, 1011, | 821, 831, | 1361, 1371, | 1181, 1191, |
| | | | 1021, 1031, | 841, 851, | 1381, 1391, | 1201, 1211, |
| | | | 1041, 1051, | 861, 871, | 1401, 1411, | 1221, 1231, |
| | | | 1061, 1071, | 881, 891, | 1421, 1431, | 1241, 1251, |
| | | | 1081, 1091, | 901, 911, | 1441, 1451, | 1261, 1271, |
| | | | 1101, 1111, | 921, 931, | 1461, 1471, | 1281, 1291, |
| | | | 1121, 1131, | 941, 951, | 1481, 1491, | 1301, 1311, |
| | | | 1141, 1151 | 961, 971 | 1501, 1511 | 1321, 1331 |
| 6 | CBFbeta(1-165)-Linker-LifeAct | 1547 | | 1565, 1575 | | |
| 7 | CBFbeta(1-165)-Linker-LifeAct | 1548 | | 1566, 1576 | | |
| 8 | CBFbeta(1-165)-HIF1alpha(549- | 234 | 982, 992, | 802, 812, | 1342, 1352, | 1162, 1172, |
| | 575) | | 1002, 1012, | 822, 832, | 1362, 1372, | 1182, 1192, |
| | | | 1022, 1032, | 842, 852, | 1382, 1392, | 1202, 1212, |
| | | | 1042, 1052, | 862, 872, | 1402, 1412, | 1222, 1232, |
| | | | 1062, 1072, | 882, 892, | 1422, 1432, | 1242, 1252, |
| | | | 1082, 1092, | 902, 912, | 1442, 1452, | 1262, 1272, |
| | | | 1102, 1112, | 922, 932, | 1462, 1472, | 1282, 1292, |
| | | | 1122, 1132, | 942, 952, | 1482, 1492, | 1302, 1312, |
| | | | 1142, 1152 | 962, 972 | 1502, 1512 | 1322, 1332 |
| 9 | CBFbeta(1-165)-Linker- | 235 | 983, 993, | 803, 813, | 1343, 1353, | 1163, 1173, |
| | HIF1alpha(549-575) | | 1003, 1013, | 823, 833, | 1363, 1373, | 1183, 1193, |
| | | | 1023, 1033, | 843, 853, | 1383, 1393, | 1203, 1213, |
| | | | 1043, 1053, | 863, 873, | 1403, 1413, | 1223, 1233, |
| | | | 1063, 1073, | 883, 893, | 1423, 1433, | 1243, 1253, |
| | | | 1083, 1093, | 903, 913, | 1443, 1453, | 1263, 1273, |
| | | | 1103, 1113, | 923, 933, | 1463, 1473, | 1283, 1293, |
| | | | 1123, 1133, | 943, 953, | 1483, 1493, | 1303, 1313, |
| | | | 1143, 1153 | 963, 973 | 1503, 1513 | 1323, 1333 |
| 10 | CBFbeta(1-165)_Linker- | 1541 | | 1559, 1569 | | |
| | NFAT5(1-17) | | | | | |
| 11 | NFAT5(1-17)_Linker-CBFbeta(1- | 1542 | | 1560, 1570 | | |
| | 165) | | | | | |
| 12 | CBFbeta(1-165)-NFAT5(1-17) | 1543 | | 1561, 1571 | | |
| 13 | NFAT5(1-17)-CBFbeta(1-165) | 1544 | | 1562, 1572 | | |
| 14 | RUNX1(1-177)-RUNX1T1a(31- | 236 | 984, 994, | 804, 814, | 1344, 1354, | 1164, 1174, |
| | 604) | | 1004, 1014, | 824, 834, | 1364, 1374, | 1184, 1194, |
| | | | 1024, 1034, | 844, 854, | 1384, 1394, | 1204, 1214, |
| | | | 1044, 1054, | 864, 874, | 1404, 1414, | 1224, 1234, |
| | | | 1064, 1074, | 884, 894, | 1424, 1434, | 1244, 1254, |
| | | | 1084, 1094, | 904, 914, | 1444, 1454, | 1264, 1274, |
| | | | 1104, 1114, | 924, 934, | 1464, 1474, | 1284, 1294, |
| | | | 1124, 1134, | 944, 954, | 1484, 1494, | 1304, 1314, |
| | | | 1144, 1154 | 964, 974 | 1504, 1514 | 1324, 1334 |
| 15 | RUNX1(1-241)- | 237 | 985, 995, | 805, 815, | 1345, 1355, | 1165, 1175, |
| | RUNX1T1b(short) | | 1005, 1015, | 825, 835, | 1365, 1375, | 1185, 1195, |
| | | | 1025, 1035, | 845, 855, | 1385, 1395, | 1205, 1215, |
| | | | 1045, 1055, | 865, 875, | 1405, 1415, | 1225, 1235, |
| | | | 1065, 1075, | 885, 895, | 1425, 1435, | 1245, 1255, |
| | | | 1085, 1095, | 905, 915, | 1445, 1455, | 1265, 1275, |
| | | | 1105, 1115, | 925, 935, | 1465, 1475, | 1285, 1295, |
| | | | 1125, 1135, | 945, 955, | 1485, 1495, | 1305, 1315, |
| | | | 1145, 1155 | 965, 975 | 1505, 1515 | 1325, 1335 |
| 16 | RUNX1(1-241)-RUNX1T1b(22- | 238, 239 | 986, 987, | 806, 807, | 1346, 1347, | 1166, 1167, |
| | 604) | | 996, 997, | 816, 817, | 1356, 1357, | 1176, 1177, |
| | | | 1006, 1007, | 826, 827, | 1366, 1367, | 1186, 1187, |
| | | | 1016, 1017, | 836, 837, | 1376, 1377, | 1196, 1197, |
| | | | 1026, 1027, | 846, 847, | 1386, 1387, | 1206, 1207, |
| | | | 1036, 1037, | 856, 857, | 1396, 1397, | 1216, 1217, |
| | | | 1046, 1047, | 866, 867, | 1406, 1407, | 1226, 1227, |
| | | | 1056, 1057, | 876, 877, | 1416, 1417, | 1236, 1237, |
| | | | 1066, 1067, | 886, 887, | 1426, 1427, | 1246, 1247, |
| | | | 1076, 1077, | 896, 897, | 1436, 1437, | 1256, 1257, |
| | | | 1086, 1087, | 906, 907, | 1446, 1447, | 1266, 1267, |
| | | | 1096, 1097, | 916, 917, | 1456, 1457, | 1276, 1277, |
| | | | 1106, 1107, | 926, 927, | 1466, 1467, | 1286, 1287, |
| | | | 1116, 1117, | 936, 937, | 1476, 1477, | 1296, 1297, |
| | | | 1126, 1127, | 946, 947, | 1486, 1487, | 1306, 1307, |
| | | | 1136, 1137, | 956, 957, | 1496, 1497, | 1316, 1317, |
| | | | 1146, 1147, | 966, 967, | 1506, 1507, | 1326, 1327, |
| | | | 1156, 1157 | 976, 977 | 1516, 1517 | 1336, 1337 |
| 17 | RUNX1(K83E, R174Q) | 197 | 978, 988, | 798, 808, | 1338, 1348, | 1158, 1168, |
| | | | 998, 1008, | 818, 828, | 1358, 1368, | 1178, 1188, |
| | | | 1018, 1028, | 838, 848, | 1378, 1388, | 1198, 1208, |
| | | | 1038, 1048, | 858, 868, | 1398, 1408, | 1218, 1228, |
| | | | 1058, 1068, | 878, 888, | 1418, 1428, | 1238, 1248, |
| | | | 1078, 1088, | 898, 908, | 1438, 1448, | 1258, 1268, |
| | | | 1098, 1108, | 918, 928, | 1458, 1468, | 1278, 1288, |
| | | | 1118, 1128, | 938, 948, | 1478, 1488, | 1298, 1308, |
| | | | 1138, 1148 | 958, 968 | 1498, 1508 | 1318, 1328 |

[0491] Particularly preferred nucleic acid of the invention, preferably RNA sequences, are provided in Table 4. Said particularly preferred RNA sequences each encode a RUNX inhibitor, in particular a RUNX trap (CBFbeta-SMMHC) according to the amino acid sequence of SEQ ID NO: 232.

[0492] In Table 4, each row represents a specific suitable RNA construct of the invention (compare with Table 3, row 1), wherein the description of the overall RNA design (e.g. UTRs, hSL) is indicated in column A. For example, row 1 relates to RNA constructs with an UTR combination “HSD17B4/PSMB3” and a 3′ terminal hSL-A100 tail, row 2 relates to RNA constructs with an UTR combination “HSD17B4/PSMB3” and a 3′ terminal A100 tail, row 3 relates to RNA constructs with an UTR combination “HSD17B4/PSMB3” and a 3′ terminal hSL-A100-N5 tail, row 4 relates to RNA constructs with an UTR combination “HSD17B4/PSMB3” and a 3′ terminal A100-N5 tail.

[0493] The corresponding SEQ ID NOs different RNA constructs comprising different coding sequences (all encoding the RUNX inhibitor “CBFB (1-165)-SMMHC (1527-1877)” according to SEQ ID NO: 232) are provided in Columns, wherein column B relates to RNA sequences comprising wild type or reference coding sequences, column C relates to RNA sequences comprising G/C optimized (opt1) coding sequences, column D relates to RNA sequences comprising human codon usage adapted (opt3) coding sequences, column E relates to RNA sequences comprising CAI maximized (opt4) coding sequences, column F relates to RNA sequences comprising G/C modified (opt5) coding sequences, and column G relates to RNA sequences comprising G/C optimized (opt11) coding sequences.

[0494] Further information is provided under “feature key”, i.e. “source” (for nucleic acids or proteins) or “misc_feature” (for nucleic acids) or “REGION” (for proteins) of the respective SEQ ID NOs in the ST.26 sequence listing.

TABLE 4
RNA sequences encoding the preferred RUNX inhibitor according to SEQ ID NO: 232:

| A | B | C | D | E | F | G |
|---|---|---|---|---|---|---|
| HSD17B4/PSMB3 | 800, 810, | 820, 830, | 840, 850, | 860, 950, | 870, 960 | 880, 970, |
| hSL-A100 | 890, 900 | 910, 920, | 930, 940 | 1567 | | 1568 |
| | | 1579-1582 | | | | |
| HSD17B4/PSMB3 | 980, 990, | 1000, 1010, | 1020, 1030, | 1040, | 1050, | 1060, |
| A100 | 1070, 1080 | 1090, 1100 | 1110, 1120 | 1130 | 1140 | 1150 |
| HSD17B4/PSMB3 | 1160, 1170, | 1180, 1190, | 1200, 1210, | 1220, | 1230, | 1240, |
| hSL-A100-N5 | 1250, 1260 | 1270, 1280 | 1290, 1300 | 1310 | 1320 | 1330 |
| HSD17B4/PSMB3 | 1340, 1350, | 1360, 1370, | 1380, 1390, | 1400, | 1410, | 1420, |
| A100-N5 | 1430, 1440 | 1450, 1460 | 1470, 1480 | 1490 | 1500 | 1510 |

[0495] In preferred embodiments, the nucleic acid, preferably the RNA, comprises or consists of a nucleic acid sequence which is identical or at least 70%, 80%, 85%, 86%, 87%, 88%, 89%, 90%, 91%, 92%, 93%, 94%, 95%, 96%, 97%, 98%, or 99% identical to a nucleic acid sequence according to any one of SEQ ID NOs: 798-1517, 1559-1582 or a fragment or variant of any of these sequences. Further information regarding respective nucleic acid sequences is provided in Table 3 and Table 4.

[0496] In other preferred embodiments, the nucleic acid, preferably the RNA, comprises or consists of a nucleic acid sequence which is identical or at least 70%, 80%, 85%, 86%, 87%, 88%, 89%, 90%, 91%, 92%, 93%, 94%, 95%, 96%, 97%, 98%, or 99% identical to a nucleic acid sequence according to any one of SEQ ID NOs: 798-1517, 1559-1582 or a fragment or variant of any of these sequences, optionally wherein at least one, preferably all uracil nucleotides in said RNA sequences are replaced by pseudouridine (ψ) nucleotides and/or N1-methylpseudouridine (m1ψ) nucleotides.

[0497] In preferred embodiments, the nucleic acid, preferably the RNA, comprises or consists of a nucleic acid sequence which is identical or at least 70%, 80%, 85%, 86%, 87%, 88%, 89%, 90%, 91%, 92%, 93%, 94%, 95%, 96%, 97%, 98%, or 99% identical to a nucleic acid sequence according to any one of SEQ ID NOs: 799-801, 809-811, 819-821, 829-831, 839-841, 849-851, 859-861, 869-871, 879-881, 889-891, 899-901, 909-911, 919-921, 929-931, 939-941, 949-951, 959-961, 969-971, 979-981, 989-991, 999-1001, 1009-1011, 1019-1021, 1029-1031, 1039-1041, 1049-1051, 1059-1061, 1069-1071, 1079-1081, 1089-1091, 1099-1101, 1109-1111, 1119-1121, 1129-1131, 1139-1141, 1149-1151, 1159-1161, 1169-1171, 1179-1181, 1189-1191, 1199-1201, 1209-1211, 1219-1221, 1229-1231, 1239-1241, 1249-1251, 1259-1261, 1269-1271, 1279-1281, 1289-1291, 1299-1301, 1309-1311, 1319-1321, 1329-1331, 1339-1341, 1349-1351, 1359-1361, 1369-1371, 1379-1381, 1389-1391, 1399-1401, 1409-1411, 1419-1421, 1429-1431, 1439-1441, 1449-1451, 1459-1461, 1469-1471, 1479-1481, 1489-1491, 1499-1501, 1509-1511, 1559-1582, or a fragment or variant of any of these sequences.

[0498] In more preferred embodiments, the nucleic acid, preferably the RNA, comprises or consists of a nucleic acid sequence which is identical or at least 70%, 80%, 85%, 86%, 87%, 88%, 89%, 90%, 91%, 92%, 93%, 94%, 95%, 96%, 97%, 98%, or 99% identical to a nucleic acid sequence according to any one of SEQ ID NOs: 800, 810, 820, 830, 840, 850, 860, 870, 880, 890, 900, 910, 920, 930, 940, 950, 960, 970, 1567, 1568, 1577, 1578-1582, 980, 990, 1000, 1010, 1020, 1030, 1040, 1050, 1060, 1070, 1080, 1090, 1100, 1110, 1120, 1130, 1140, 1150, 1160, 1170, 1180, 1190, 1200, 1210, 1220, 1230, 1240, 1250, 1260, 1270, 1280, 1290, 1300, 1310, 1320, 1330, 1340, 1350, 1360, 1370, 1380, 1390, 1400, 1410, 1420, 1430, 1440, 1450, 1460, 1470, 1480, 1490, 1500, 1510, or a fragment or variant of any of these sequences encoding CBFbeta-SMMHC (see also Table 4).

[0499] In preferred embodiments, the nucleic acid, preferably the RNA, comprises or consists of a nucleic acid sequence which is identical or at least 70%, 80%, 85%, 86%, 87%, 88%, 89%, 90%, 91%, 92%, 93%, 94%, 95%, 96%, 97%, 98%, or 99% identical to a nucleic acid sequence according to SEQ ID NOs: 820, 1579, 1581 or 910 1580, 1582, or a fragment or variant thereof encoding CBFbeta-SMMHC.

[0500] In particularly preferred embodiments, the nucleic acid is a N1-methylpseudouridine (m1w) modified RNA, that comprises or consists of a nucleic acid sequence which is identical or at least 70%, 80%, 85%, 86%, 87%, 88%, 89%, 90%, 91%, 92%, 93%, 94%, 95%, 96%, 97%, 98%, or 99% identical to a nucleic acid sequence according to SEQ ID NOs: 1579 or 1580, or a fragment or variant thereof encoding CBFbeta-SMMHC.

[0501] In particularly preferred embodiments, the artificial nucleic acid of the invention is a N1-methylpseudouridine (m1w) modified 5′ cap1 mRNA that comprises or consists of an RNA sequence which is identical or at least 90% identical to a nucleic sequence according to SEQ ID NOs: 1579 or 1580, or a fragment or variant of any of these sequences encoding CBFbeta-SMMHC.

[0502] In a particularly preferred embodiment, the artificial nucleic acid of the invention is a N1-methylpseudouridine (m1w) modified 5′ cap1 mRNA that comprises or consists of an RNA sequence which is identical or at least 90% identical to a nucleic sequence according to SEQ ID NO: 1580, or a fragment or variant of any of these sequences encoding CBFbeta-SMMHC.

### 2: Composition Comprising at Least One Nucleic Acid Encoding a Transcription Factor Inhibitor:

[0503] In a second aspect, the invention provides a pharmaceutical composition comprising at least one nucleic acid encoding at least one transcription factor inhibitor as defined in the first aspect.

[0504] Notably, features and embodiments described in the context of the first aspect (the nucleic acid of the invention encoding at least one transcription factor inhibitor) have to be read on and have to be understood as suitable embodiments of the pharmaceutical composition of the second aspect and vice versa.

[0505] In the context of the invention, a “composition” refers to any type of composition in which the specified ingredients (e.g. nucleic acid encoding at least one transcription factor inhibitor) may be incorporated, optionally along with any further constituents, usually with at least one pharmaceutically acceptable carrier or excipient. The composition may be a dry composition such as a powder, a granule, or a solid lyophilized form. Alternatively, the composition may be in liquid form, and each constituent may be independently incorporated in dissolved or dispersed (e.g. suspended or emulsified) form.

[0506] Preferably, the at least one nucleic acid of the pharmaceutical composition is selected from an RNA as further defined in the first aspect. In particularly preferred embodiments, the at least one nucleic acid of the pharmaceutical composition is selected from an mRNA as further defined in first aspect.

[0507] In embodiments, the nucleic acid, preferably the RNA as comprised in the pharmaceutical composition is provided in an amount of about 10 ng to about 500 μg, in an amount of about 1 μg to about 500 μg, in an amount of about 1 μg to about 100 μg, specifically, in an amount of about 1 μg, 2 μg, 3 μg, 4 μg, 5 μg, 6 μg, 7 μg, 8 μg, 9 μg, 10 μg, 11 μg, 12 μg, 13 μg, 14 μg, 15 μg, 20 μg, 25 μg, 30 μg, 35 μg, 40 μg, 45 μg, 50 μg, 55 μg, 60 μg, 65 μg, 70 μg, 75 μg, 80 μg, 85 μg, 90 μg, 95 μg or 100 μg.

[0508] In preferred embodiments, the pharmaceutical composition comprises a plurality or at least more than one nucleic acid species (e.g. RNA species), preferably wherein each nucleic acid species encodes a different transcription factor inhibitor.

[0509] Preferably, the pharmaceutical composition as defined herein may comprise 2, 3, 4, 5, 6, 7, 8, 9, or 10 nucleic acid species each as defined in the first aspect, wherein each of the 2, 3, 4, 5, 6, 7, 8, 9, or 10 nucleic acid species encode a different transcription factor inhibitor, wherein the at least one different transcription factor inhibitor differs in at least one amino acid position.

[0510] For example, the pharmaceutical composition as defined herein may comprise at least one artificial nucleic acid encoding at least one transcription factor inhibitor comprising a CBFbeta amino acid sequence element and an SMMHC amino acid sequence element (CBFbeta-SMMHC); and at least one selected from
[0511] (i) at least one artificial nucleic acid encoding at least one transcription factor inhibitor comprising a RUNX1 amino acid sequence element and an RUNX1T1 amino acid sequence element (RUNX1-RUNX1T1);
[0512] (ii) at least one artificial nucleic acid encoding at least one transcription factor inhibitor comprising a mutated RUNX1 amino acid sequence element (RUNX1 (K83E,R174Q));
[0513] (iii) at least one artificial nucleic acid encoding at least one transcription factor inhibitor comprising a mutated RUNX1 amino acid sequence element (RUNX1 (K83E,R174Q);
[0514] (iv) at least one artificial nucleic acid encoding at least one transcription factor inhibitor comprising a CBFbeta amino acid sequence element and an NFAT5 amino acid sequence element;
[0515] (v) at least one artificial nucleic acid encoding at least one transcription factor inhibitor comprising a CBFbeta amino acid sequence element and an HIF1alpha amino acid sequence element.

[0516] In various embodiments, the at least one artificial nucleic acid, preferably the at least one RNA of the pharmaceutical composition, is formulated with a pharmaceutically acceptable carrier or excipient.

[0517] The term “pharmaceutically acceptable carrier” or “pharmaceutically acceptable excipient” as used herein preferably includes the liquid or non-liquid basis of the composition for administration. If the pharmaceutical composition is provided in liquid form, the carrier may be water, e.g. pyrogen-free water; isotonic saline or buffered (aqueous) solutions, e.g. phosphate, citrate etc. buffered solutions. Water or preferably a buffer, more preferably an aqueous buffer, may be used comprising e.g. a sodium salt, a calcium salt, or a potassium salt. According to preferred embodiments, the sodium, calcium or potassium salts may occur in the form of their halogenides, e.g. chlorides, iodides, or bromides, in the form of their hydroxides, carbonates, hydrogen carbonates, or sulphates, etc. Examples of sodium salts include NaCl, Na₂HPO₄, Na₃PO₄, NaI, NaBr, Na2CO3, NaHCO3, Na2SO4, examples of potassium salts include KCl, Kl, KBr, K2CO3, KHCO3, K2SO4, and examples of calcium salts include CaCl2, CaI2, CaBr2, CaCO3, CaSO4, Ca(OH)2.

[0518] Furthermore, organic anions of the aforementioned cations may be in the buffer. Accordingly, in embodiments, the nucleic acid composition may comprise pharmaceutically acceptable carriers or excipients using one or more pharmaceutically acceptable carriers or excipients to e.g. increase stability, increase cell transfection, permit the sustained or delayed, increase the translation of encoded transcription factor inhibitor in vivo, and/or alter the release profile of the encoded transcription factor inhibitor in vivo. In addition to traditional excipients such as any and all solvents, dispersion media, diluents, or other liquid vehicles, dispersion or suspension aids, surface active agents, isotonic agents, thickening or emulsifying agents, preservatives, excipients of the present invention can include, without limitation, lipidoids, liposomes, lipid nanoparticles, polymers, lipoplexes, core-shell nanoparticles, peptides, proteins, cells transfected with polynucleotides, hyaluronidase, nanoparticle mimics and combinations thereof. In embodiments, one or more compatible solid or liquid fillers or diluents or encapsulating compounds may be used as well, which are suitable for administration to a subject. The term “compatible” as used herein means that the constituents of the pharmaceutical composition are capable of being mixed with the at least one nucleic acid and, optionally, a plurality of nucleic acids of the composition, in such a manner that no interaction occurs, which would substantially reduce the biological activity or the pharmaceutical effectiveness of the composition under typical use conditions. Pharmaceutically acceptable carriers or excipients must have sufficiently high purity and sufficiently low toxicity to make them suitable for administration to a subject to be treated. Compounds which may be used as pharmaceutically acceptable carriers or excipients may be sugars, such as, for example, lactose, glucose, trehalose, mannose, and sucrose; starches, such as, for example, corn starch or potato starch; dextrose; cellulose and its derivatives, such as, for example, sodium carboxymethylcellulose, ethylcellulose, cellulose acetate; powdered tragacanth; malt; gelatin; tallow; solid glidants, such as, for example, stearic acid, magnesium stearate; calcium sulfate; vegetable oils, such as, for example, groundnut oil, cottonseed oil, sesame oil, olive oil, corn oil and oil from theobroma; polyols, such as, for example, polypropylene glycol, glycerol, sorbitol, mannitol and polyethylene glycol; alginic acid.

[0519] Pharmaceutical compositions of the present invention are suitably sterile and/or pyrogen-free.

### Formulation/Complexation:

[0520] In preferred embodiments, the at least one nucleic acid, preferably the at least one RNA of the pharmaceutical composition is complexed or associated with at least one further compound to obtain a formulated composition. A formulation in that context may have the function of a transfection agent. A formulation in that context may also have the function of protecting the nucleic acid from degradation, e.g. to allow storage, shipment, etc.

[0521] In preferred embodiments, the at least one nucleic acid, preferably the at least one RNA of the pharmaceutical composition is formulated with at least one compound, e.g. peptides, proteins, lipids, polysaccharides, and/or polymers.

[0522] In preferred embodiments, the at least one artificial nucleic acid, preferably the at least one RNA of the pharmaceutical composition is formulated with at least one cationic (cationic or preferably ionizable) or polycationic compound (cationic or preferably ionizable).

[0523] In preferred embodiments, the at least one artificial nucleic acid, preferably the at least one RNA of the pharmaceutical composition is complexed or associated with or at least partially complexed or partially associated with one or more cationic (cationic or preferably ionizable) or polycationic compound.

[0524] The term “cationic or polycationic compound” as used herein will be recognized and understood by the person of ordinary skill in the art, and are for example intended to refer to a charged molecule, which is positively charged at a pH value ranging from about 1 to 9, at a pH value ranging from about 3 to 8, at a pH value ranging from about 4 to 8, at a pH value ranging from about 5 to 8, more preferably at a pH value ranging from about 6 to 8, even more preferably at a pH value ranging from about 7 to 8, most preferably at a physiological pH, e.g. ranging from about 7.2 to about 7.5. Accordingly, a cationic component, e.g. a cationic peptide, cationic protein, cationic polymer, cationic polysaccharide, cationic lipid may be any positively charged compound or polymer which is positively charged under physiological conditions. A “cationic or polycationic peptide or protein” may contain at least one positively charged amino acid, or more than one positively charged amino acid, e.g. selected from Arg, His, Lys or Om. Accordingly, “polycationic” components are also within the scope exhibiting more than one positive charge under the given conditions.

[0525] In preferred embodiments, the at least one cationic or polycationic compound is selected from a cationic or polycationic polymer, a cationic or polycationic polysaccharide, a cationic or polycationic lipid, a cationic or polycationic protein, a cationic or polycationic peptide, or any combinations thereof.

[0526] In preferred embodiments, the at least one cationic or polycationic compound is selected from a cationic or polycationic peptide or protein.

[0527] Preferred cationic or polycationic proteins or peptides that may be used for complexation can be derived from formula (Arg)l; (Lys)m; (His)n; (Or)o; (Xaa)x of the patent application WO2009030481 or WO2011026641, the disclosure of WO2009030481 or WO2011026641 relating thereto incorporated herewith by reference.

[0528] In preferred embodiments, the at least one artificial nucleic acid, preferably the at least one RNA is complexed, or at least partially complexed, with at least one cationic or polycationic proteins or peptides preferably selected from SEQ ID NOs: 173-177, or any combinations thereof.

[0529] In some embodiments, the pharmaceutical composition comprises at least one nucleic acid, preferably the at least one RNA as defined herein, and a polymeric carrier.

[0530] The term “polymeric carrier” as used herein will be recognized and understood by the person of ordinary skill in the art, and are e.g. intended to refer to a compound that facilitates transport and/or complexation of another compound. A polymeric carrier is typically a carrier that is formed of a polymer. A polymeric carrier may be associated to its cargo (e.g. RNA) by covalent or non-covalent interaction. A polymer may be based on different subunits, such as a copolymer. Suitable polymeric carriers in that context may include, for example, polyethylenimine (PEI).

[0531] A preferred polymeric carrier may be a polymeric carrier formed by disulfide-crosslinked cationic compounds. The disulfide-crosslinked cationic compounds may be the same or different from each other. The polymeric carrier can also contain further components. The polymeric carrier used according to the present invention may comprise mixtures of cationic peptides, proteins or polymers and optionally further components as defined herein, which are cross-linked by disulfide bonds (via —SH groups).

[0532] In this context, polymeric carriers according to formula {(Arg)l; (Lys)m; (His)n; (Orn)o; (Xaa)x (Cys)y} and formula Cys, {(Arg)l; (Lys)m; (His)n; (Or)o; (Xaa)x}Cys2 of the patent application WO2012013326 are preferred, the disclosure of WO2012013326 relating thereto incorporated herewith by reference.

[0533] In preferred embodiments, the polymeric carrier used to complex the at least one nucleic acid, preferably the at least one RNA may be derived from a polymeric carrier molecule according formula (L-P1-S—[S—P2-S]n-S—P3-L) of the patent application WO2011026641, the disclosure of WO2011026641 relating thereto incorporated herewith by reference.

[0534] In preferred embodiments, the polymeric carrier compound is formed by, or comprises or consists of the peptide elements CysArg12Cys (SEQ ID NO: 173) or CysArg12 (SEQ ID NO: 174) or TrpArg12Cys (SEQ ID NO: 175). In particularly preferred embodiments, the polymeric carrier compound consists of a (R12C)-(R12C) dimer, a (WR12C)-(WR12C) dimer, or a (CR12)-(CR12C)-(CR12) trimer, wherein the individual peptide elements in the dimer (e.g. (WR12C)), or the trimer (e.g. (CR12)), are connected via-SH groups.

[0535] In preferred embodiment, the at least one artificial nucleic acid, preferably the at least one RNA is complexed or associated with a polyethylene glycol/peptide polymer, preferably comprising HO-PEG5000-S-(S-CHHHHHHRRRRHHHHHHC-S-)7-S-PEG5000-OH (SEQ ID NO: 176 as peptide monomer), HO-PEG5000-S-(S-CHHHHHHRRRRHHHHHHC-S-)4 S-PEG5000-OH (SEQ ID NO: 176 as peptide monomer), HO-PEG5000-S-(S-CGHHHHHRRRRHHHHHGC-S-)7-S-PEG5000-OH (SEQ ID NO: 177 as peptide monomer) and/or a polyethylene glycol/peptide polymer comprising HO-PEG5000-S-(S-CGHHHHHRRRRHHHHHGC-S-) 4-S-PEG5000-OH (SEQ ID NO: 177 as peptide monomer).

[0536] In other embodiments, the at least one nucleic acid of the composition, preferably the at least one RNA is complexed or associated with polymeric carriers and, optionally, with at least one lipid component as described in WO2017212008, WO2017212006, WO2017212007, and WO2017212009. In this context, the disclosures of WO2017212008, WO2017212006, WO2017212007, and WO2017212009 are herewith incorporated by reference.

[0537] In a particularly preferred embodiment, the polymeric carrier of the pharmaceutical composition is a peptide polymer, preferably a polyethylene glycol/peptide polymer as defined above, and a lipid component, preferably a lipidoid component.

[0538] A lipidoid (or lipidoit) is a lipid-like compound, i.e. an amphiphilic compound with lipid-like physical properties. The lipidoid is preferably a compound, which comprises two or more cationic nitrogen atoms and at least two lipophilic tails. In contrast to many conventional cationic lipids, the lipidoid may be free of a hydrolysable linking group, in particular linking groups comprising hydrolysable ester, amide or carbamate groups. The cationic nitrogen atoms of the lipidoid may be cationisable or permanently cationic, or both types of cationic nitrogens may be present in the compound. In the context of the present invention, the term lipid is considered to also encompass lipidoids.

[0539] Suitably, the lipidoid is cationic, which means that it is cationisable or permanently cationic. In one embodiment, the lipidoid is cationisable, i.e. it comprises one or more cationisable nitrogen atoms, but no permanently cationic nitrogen atoms. In another embodiment, at least one of the cationic nitrogen atoms of the lipidoid is permanently cationic. Optionally, the lipidoid comprises two permanently cationic nitrogen atoms, three permanently cationic nitrogen atoms, or even four or more permanently cationic nitrogen atoms.

[0540] In preferred embodiment at least one artificial nucleic acid, preferably the at least one RNA of the pharmaceutical composition is complexed or associated with a polymeric carrier, preferably with a polyethylene glycol/peptide polymer as defined above, and a lipidoid component,

[0541] In preferred embodiments, the lipidoid component is a compound according to formula A

[chemical structure]

[0542] wherein
[0543] RA is independently selected for each occurrence an unsubstituted, cyclic or acyclic, branched or unbranched C1-20 aliphatic group; a substituted or unsubstituted, cyclic or acyclic, branched or unbranched C1-20 heteroaliphatic group; a substituted or unsubstituted aryl; a substituted or unsubstituted heteroaryl;

[chemical structure]

[0544] wherein at least one RA is

[chemical structure]

[0545] R5 is independently selected for each occurrence of from an unsubstituted, cyclic or acyclic, branched or unbranched C8-16 aliphatic; a substituted or unsubstituted aryl; or a substituted or unsubstituted heteroaryl;
[0546] each occurrence of x is an integer from 1 to 10;
[0547] each occurrence of y is an integer from 1 to 10;
[0548] or a pharmaceutically acceptable salt thereof.

[0549] In a preferred embodiment, the lipidoid component may be any one selected from the lipidoids of the lipidoids provided in the table of page 50-54 of published PCT patent application WO2017212009, the specific lipidoids provided in said table, and the specific disclosure relating thereto herewith incorporated by reference.

[0550] In preferred embodiments, the lipidoid component may be any one selected from 3-C12-OH, 3-C12-OH-cat, 3-C12-amide, 3-C12-amide monomethyl, 3-C12-amide dimethyl, RevPEG(10)-3-C12-OH, RevPEG(10)-DLin-pAbenzoic, 3C12amide-TMA cat., 3C12amide-DMA, 3C12amide-NH2, 3C12amide-OH, 3C12Ester-OH, 3C12 Ester-amin, 3C12Ester-DMA, 2C12Amid-DMA, 3C12-lin-amid-DMA, 2C12-sperm-amid-DMA, or 3C12-sperm-amid-DMA (see table of published PCT patent application WO2017212009 (pages 50-54)).

[0551] Particularly preferred lipidoid components in the context of the invention are 3-C12-OH, 3-C12-OH-cat, 3-C12-C3-OH.

[0552] In preferred embodiments, the polyethylene glycol/peptide polymer comprising a lipidoid as specified above (e.g. 3-C12-OH or 3-C12-OH-cat), is used to complex the at least one nucleic acid to form complexes having an N/P ratio from about 0.1 to about 20, or from about 0.2 to about 15, or from about 2 to about 15, or from about 2 to about 12, wherein the N/P ratio is defined as the mole ratio of the nitrogen atoms of the basic groups of the cationic peptide or polymer to the phosphate groups of the nucleic acid. In that context, the disclosure of published PCT patent application WO2017212009, in particular claims 1 to 10 of WO2017212009, and the specific disclosure relating thereto is herewith incorporated by reference.

[0553] Further suitable lipidoids may be derived from published PCT patent application WO2010053572. In particular, lipidoids derivable from claims 1 to 297 of published PCT patent application WO2010053572 may be used in the context of the invention, e.g. incorporated into the peptide polymer as described herein, or e.g. incorporated into the lipid nanoparticle (as described below). Accordingly, claims 1 to 297 of published PCT patent application WO2010053572, and the specific disclosure relating thereto, is herewith incorporated by reference.

[0554] In particularly preferred embodiments, the pharmaceutical composition comprises at least one nucleic acid, preferably RNA that comprises or consists of a nucleic acid sequence encoding at least one transcription factor trap, preferably a RUNX inhibitor as defined herein, wherein the nucleic acid is formulated in a polyethylene glycol/peptide polymer as defined herein comprising a lipidoid as defined herein.

[0555] Preferably, said formulations are particularly suitable for ocular administration.

### Formulation in Lipid-Based Carriers:

[0556] In particularly preferred embodiments, the at least one artificial nucleic acid, preferably the at least one RNA of the pharmaceutical composition is formulated in lipid-based carriers.

[0557] In the context of the invention, the term “lipid-based carriers” encompass lipid-based delivery systems for nucleic acid (e.g. RNA) that comprise a lipid component. A lipid-based carrier may additionally comprise other components suitable for encapsulating/incorporating/complexing a nucleic acid (e.g. RNA) including a cationic or polycationic polymer, a cationic or polycationic polysaccharide, a cationic or polycationic protein, a cationic or polycationic peptide, or any combinations thereof.

[0558] In the context of the invention, a typical “lipid-based carrier” is selected from liposomes, lipid nanoparticles (LNPs), lipoplexes, solid lipid nanoparticles, and/or nanoliposomes. The nucleic acid, preferably the RNA of the pharmaceutical composition may completely or partially incorporated or encapsulated in a lipid-based carrier, wherein the nucleic acid (e.g. RNA) may be located in the interior space of the lipid-based carrier, within the lipid layer/membrane of the lipid-based carrier, or associated with the exterior surface of the lipid-based carrier. The incorporation of nucleic acid, preferably the RNA into lipid-based carriers may be referred to as “encapsulation”. A “lipid-based carrier” is not restricted to any particular morphology, and include any morphology generated when e.g. an aggregation reducing lipid and at least one further lipid are combined, e.g. in an aqueous environment in the presence of nucleic acid (e.g. RNA). For example, an LNP, a liposome, a lipid complex, a lipoplex and the like are within the scope of the term “lipid-based carrier”. Lipid-based carriers can be of different sizes such as, but not limited to, a multilamellar vesicle (MLV) which may be hundreds of nanometers in diameter and may contain a series of concentric bilayers separated by narrow aqueous compartments, a small unicellular vesicle (SUV) which may be smaller than 50 nm in diameter, and a large unilamellar vesicle (LUV) which may be between 50 nm and 500 nm in diameter. Liposomes, a specific type of lipid-based carrier, are characterized as microscopic vesicles having an interior aqua space sequestered from an outer medium by a membrane of one or more bilayers. In a liposome, the at least one nucleic acid (e.g. RNA) is typically located in the interior aqueous space enveloped by some or the entire lipid portion of the liposome. Bilayer membranes of liposomes are typically formed by amphiphilic molecules, such as lipids of synthetic or natural origin that comprise spatially separated hydrophilic and hydrophobic domains. Lipid nanoparticles (LNPs), a specific type of lipid-based carrier, are characterized as microscopic lipid particles having a solid core or partially solid core. Typically, an LNP does not comprise an interior aqua space sequestered from an outer medium by a bilayer. In an LNP, the at least one nucleic acid (e.g. RNA) may be encapsulated or incorporated in the lipid portion of the LNP enveloped by some or the entire lipid portion of the LNP. An LNP may comprise any lipid capable of forming a particle to which the nucleic acid (e.g. RNA) may be attached, or in which the nucleic acid may be encapsulated. Preferably, said lipid-based carriers are particularly suitable for ocular administration.

[0559] In preferred embodiments, the lipid-based carriers of the pharmaceutical composition are selected from liposomes, lipid nanoparticles, lipoplexes, solid lipid nanoparticles, lipo-polylexes, and/or nanoliposomes.

[0560] In preferred embodiments, the lipid-based carriers of the pharmaceutical composition are lipid nanoparticles (LNPs). In particularly preferred embodiments, the lipid nanoparticles of the pharmaceutical composition encapsulate the at least one nucleic acid, preferably the at least one RNA of the invention.

[0561] The term “encapsulated”, e.g. incorporated, complexed, encapsulated, partially encapsulated, associated, partially associated, refers to the essentially stable combination of nucleic acid, preferably RNA with one or more lipids into lipid-based carriers (e.g. larger complexes or assemblies) preferably without covalent binding of the nucleic acid. The lipid-based carriers-encapsulated nucleic acid (e.g. RNA) may be completely or partially located in the interior of the lipid-based carrier (e.g. the lipid portion and/or an interior space) and/or within the lipid layer/membrane of the lipid-based carriers. The encapsulation of a nucleic acid (e.g. RNA) into lipid-based carriers is also referred to herein as “incorporation” as the nucleic acid (e.g. RNA) is preferably contained within the interior of the lipid-based carriers. Without wishing to be bound to theory, the purpose of incorporating or encapsulating nucleic acid into lipid-based carriers may be to protect the nucleic acid from an environment which may contain enzymes, chemicals, or conditions that degrade the nucleic acid (e.g. RNA). Moreover, incorporating nucleic acid into lipid-based carriers may promote the uptake of the nucleic acid and their release from the endosomal compartment, and hence, may enhance the therapeutic effect of the nucleic acid (e.g. RNA) when administered to a cell or a subject.

[0562] In preferred embodiments, the lipid-based carriers of the pharmaceutical composition comprise at least one or more lipids selected from at least one aggregation-reducing lipid, at least one cationic lipid, at least one neutral lipid or phospholipid, or at least one steroid or steroid analog, or any combinations thereof.

[0563] In preferred embodiments, the lipid-based carriers of the pharmaceutical composition comprise (i) an aggregation-reducing lipid, (ii) a cationic lipid or ionizable lipid, and (iii) a neutral lipid/phospholipid or a steroid/steroid analog.

[0564] In particularly preferred embodiments, the lipid-based carriers of the pharmaceutical composition comprise an (i) aggregation-reducing lipid, (ii) a cationic lipid or ionizable lipid, (iii) a neutral lipid or phospholipid, (iv) and a steroid or steroid analog.

### Cationic Lipids:

[0565] In preferred embodiments, the lipid-based carriers comprise at least one cationic or ionizable lipid.

[0566] The cationic or ionizable lipid of the lipid-based carriers may be cationisable or ionizable, i.e. it becomes protonated as the pH is lowered below the pK of the ionizable group of the lipid, but is progressively more neutral at higher pH values. At pH values below the pK, the lipid is then able to associate with negatively charged nucleic acids. In certain embodiments, the cationic lipid comprises a zwitterionic lipid that assumes a positive charge on pH decrease.

[0567] In preferred embodiments, the lipid-based carriers comprise a cationic or ionizable lipid that preferably carries a net positive charge at physiological pH, more preferably the cationic or ionizable lipid comprises a tertiary nitrogen group or quaternary nitrogen group. Accordingly, in preferred embodiments, the lipid-based carriers comprise a cationic or ionizable lipid selected from an amino lipid.

[0568] In further embodiments, the lipid formulation comprises cationic or ionizable lipids as defined in Formula I of paragraph [00251] of WO2021222801 or a lipid selected from the disclosure of paragraphs [00260] or [00261] of WO2021222801. In other embodiments, the lipid formulation comprises cationic or ionizable lipids selected from the group consisting of ATX-001 to ATX-132 as disclosed in claim 90 of WO2021183563, preferably ATX-0126. The disclosure of WO2021222801 and WO2021183563, especially aforementioned lipids, are incorporated herewith by reference.

[0569] Accordingly, the at least one cationic or ionizable lipid can be a lipid selected or derived from formula (III-1)

[chemical structure]

[0570] preferably, wherein one of L1 or L2 is —O(C═O)—, —(C═O)O—, —C(═O)—, —O—, —S(O)x-, —S—S—, —C(═O)S—, SC(═O)—, —NRaC(═O)—, —C(═O)NRa—, —NRaC(═O)NRa—, —OC(═O)NRa— or —NRaC(═O)O—, and the other of L1 or L2 is —O(C═O)—, —(C═O)O—, —C(═O)—, —O—, —S(O)x—, —S S—, —C(═O)S—, SC(═O)—, —NRaC(═O)—, —C(═O)NRa—, —NRaC(═O)NRa—, —OC(═O)NRa— or —NRaC(═O)O— or a direct bond; G1 and G2 are each independently unsubstituted C1-C12 alkylene or C1-C12 alkenylene; G3 is C1-C24 alkylene, C1-C24 alkenylene, C3-C8 cycloalkylene, C3-C8 cycloalkenylene; Ra is H or C1-C12 alkyl; R1 and R2 are each independently C6-C24 alkyl or C6-C24 alkenyl; R3 is H, OR5, CN, C(═O)OR4, OC(═O)R4 or —NR5C(═O)R4; R4 is C1-C12 alkyl; R5 is H or C1-C6 alkyl; and x is 0, 1 or 2.

[0571] In some embodiments, cationic or ionizable lipids may be selected from the lipids disclosed in WO2018078053 (i.e. lipids derived from formula I, II, and Ill of WO2018078053, or lipids as specified in claims 1 to 12 of WO2018078053), the disclosure of WO2018078053 hereby incorporated by reference in its entirety. In that context, lipids disclosed in Table 7 of WO2018078053 (e.g. lipids derived from formula I-1 to 1-41) and lipids disclosed in Table 8 of WO2018078053 (e.g. lipids derived from formula II-1 to II-36) may be suitably used in the context of the invention. Accordingly, formula I-1 to formula I-41 and formula II-1 to formula II-36 of WO2018078053A, and the specific disclosure relating thereto, are herewith incorporated by reference.

[0572] In preferred embodiments, the lipid-based carriers of the pharmaceutical composition comprise a cationic lipid selected or derived from structures III-1 to III-36 of Table 9 of published PCT patent application WO2018078053. Accordingly, formula III-1 to III-36 of WO2018078053, and the specific disclosure relating thereto, are herewith incorporated by reference.

[0573] In preferred embodiments, the lipid-based carriers comprise a cationic lipid selected or derived from formula III-3:

[chemical structure]

[0574] The lipid of formula III-3 as suitably used herein has the chemical term ((4-hydroxybutyl)azanediyl)bis(hexane-6,1-diyl)bis(2-hexyldecanoate), also referred to as ALC-0315 i.e. CAS Number 2036272-55-4.

[0575] Further suitable cationic lipids may be selected or derived from cationic lipids according to PCT claims 1 to 14 of published patent application WO2021123332, or table 1 of WO2021123332, the disclosure relating to claims 1 to 14 or table 1 of WO2021123332 herewith incorporated by reference.

[0576] Accordingly, suitable cationic lipids may be selected or derived from cationic lipids according Compound 1 to Compound 27 (C1-C27) of Table 1 of WO2021123332.

[0577] In other preferred embodiments, the lipid-based carriers of the pharmaceutical composition comprise a cationic lipid selected or derived from (COATSOMERSS-EC) SS-33/4PE-15 (see C23 in Table 1 of WO2021123332).

[0578] In other preferred embodiments, the lipid-based carriers of the pharmaceutical composition comprise a cationic lipid selected or derived from HEXA-C5DE-PipSS (see C2 in Table 1 of WO2021123332). In most preferred embodiments, the lipid-based carriers of the pharmaceutical composition comprise a cationic lipid selected or derived from compound C26 as disclosed in Table 1 of WO2021123332:

[chemical structure]

[0579] In other embodiments, the lipid-based carriers of the pharmaceutical composition comprise a cationic lipid selected or derived from 9-Heptadecanyl 8-{(2-hydroxyethyl)[6-oxo-6-(undecyloxy)hexyl]amino}octanoate, also referred to as SM-102. Other preferred lipid-based carriers (e.g. LNPs) of the pharmaceutical composition comprise a squaramide ionizable amino lipid, more preferably a cationic lipid selected from the group consisting of formulas (M1) and (M2):

[chemical structure]

[0580] wherein the substituents (e.g. R₁, R₂, R₃, R₅, R₆, R₇, R₁₀, M, M₁, m, n, o, l) are defined in claims 1 to 13 of U.S. Pat. Nos. 10,392,341B2; 10,392,341B2 being incorporated herein in its entirety.

[0581] Accordingly, in preferred embodiments, the lipid-based carriers of the pharmaceutical composition comprise a cationic lipid selected or derived from above mentioned ALC-0315, SM-102, SS-33/4PE-15, HEXA-C5DE-PipSS, or compound C26 (see C26 in Table 1 of WO2021123332).

[0582] In preferred embodiments, the lipid-based carriers of the pharmaceutical composition comprise a cationic lipid ALC-0315.

[0583] In preferred embodiments the lipid-based carriers of the pharmaceutical composition comprising a cationic lipid ALC-0315 are used for treating eye disease.

[0584] In preferred embodiments the lipid-based carriers of the pharmaceutical composition comprising a cationic lipid ALC-0315 are used for treating EMT-associated diseases include pathologic ocular fibrosis and proliferation, for example PVR, conjunctival fibrosis (e.g. ocular cicatricial pemphigoid), corneal scarring, corneal epithelial down growth, and/or aberrant fibrosis, diseases in the anterior segment of the eye (e.g., comeal opacification and glaucoma), corneal dystrophies, herpetic keratitis, inflammation (e.g., pterygium), macula edema, retinal and vitreous hemorrhage, fibrovascular scarring, neovascular glaucoma, age-related macular degeneration (ARMD), geographic atrophy, diabetic retinopathy (DR), retinopathy of prematurity (ROP), subretinal fibrosis, epiretinal fibrosis, and gliosis. Other conditions associated with EMT including cancer, e.g., mesothelioma, ocular chronic graft-versus-host disease, corneal scarring, commeal epithelial downgrowth, conjunctival scarring, eye tumors such as melanoma and metastatic tumors, or fibrosis.

[0585] In preferred embodiments the lipid-based carriers of the pharmaceutical composition comprising a cationic lipid ALC-0315 are used for treating PVR.

[0586] In some embodiments, the lipid-based carriers of the invention comprise two or more (different) cationic lipids as defined herein.

[0587] In certain embodiments, the cationic lipid as defined herein, more preferably cationic lipid ALC-0315, is present in the lipid-based carriers in an amount from about 30 mol % to about 95 mol %, relative to the total lipid content of the lipid-based carriers. If more than one cationic lipid is incorporated within the lipid-based carriers, such percentages apply to the combined cationic lipids.

[0588] In certain embodiments, the cationic lipid as defined herein is present in the lipid-based carriers in an amount from about 30 to about 95 mole percent, relative to the total lipid content of the lipid-based carriers. If more than one cationic lipid is incorporated within the lipid-based carriers, such percentages apply to the combined cationic lipids.

[0589] In embodiments, the cationic lipid is present in the lipid-based carriers in an amount from about 30 to about 70 mole percent. In one embodiment, the cationic lipid is present in the lipid-based carriers in an amount from about 40 to about 60 mole percent, such as about 40, 41, 42, 43, 44, 45, 46, 47, 48, 49, 50, 51, 52, 53, 54, 55, 56, 57, 58, 59 or 60 mole percent, respectively. In embodiments, the cationic lipid is present in the lipid-based carriers in an amount from about 47 to about 48 mole percent, such as about 47.0, 47.1, 47.2, 47.3, 47.4, 47.5, 47.6, 47.7, 47.8, 47.9, 50.0 mole percent, respectively, wherein 47.4 mole percent are particularly preferred. In other preferred embodiments, the cationic lipid is present in the lipid-based carriers in an amount from about 55 to about 65 mole percent, such as about 55, 56, 57, 58, 59, 60, 61, 62, 63, 64 or 65 mole percent, respectively, wherein 59 mole percent are particularly preferred.

[0590] In some embodiments, the cationic lipid is present in a ratio of from about 20 mol % to about 70 or 75 mol % or from about 45 to about 65 mol % or about 20, 25, 30, 35, 40, 45, 50, 55, 60, 65, or about 70 mol % of the total lipid present in the lipid-based carriers. In further embodiments, the LNPs comprise from about 25% to about 75% on a molar basis of cationic lipid, e.g., from about 20 to about 70%, from about 35 to about 65%, from about 45 to about 65%, about 60%, about 57.5%, about 57.1%, about 50% or about 40% on a molar basis (based upon 100% total moles of lipid in the lipid nanoparticle). In a most preferred embodiment, the lipid-based carrier includes from about 59% on a molar basis of cationic or ionizable lipid.

[0591] In some embodiments, the ratio of cationic lipid to nucleic acid, preferably to RNA is from about 3 to about 15, such as from about 5 to about 13 or from about 7 to about 11.

### Neutral Lipids:

[0592] In preferred embodiments, the lipid-based carriers (e.g. LNPs) comprise at least one neutral lipid or phospholipid.

[0593] The term “neutral lipid” refers to any one of a number of lipid species that exist in either an uncharged or neutral zwitterionic form at physiological pH. Suitable neutral lipids include diacylphosphatidylcholines, diacylphosphatidylethanolamines, ceramides, sphingomyelins, dihydrosphingomyelins, cephalins, and cerebrosides. The selection of neutral lipids for use in the particles described herein is generally guided by consideration of, e.g., lipid particle size and stability of the lipid particle in the bloodstream. Preferably, the neutral lipid is a lipid having two acyl groups (e.g., diacylphosphatidylcholine and diacylphosphatidylethanolamine). In one embodiment, the neutral lipids contain saturated fatty acids with carbon chain lengths in the range of C10 to C20. In another embodiment, neutral lipids with mono or diunsaturated fatty acids with carbon chain lengths in the range of C10 to C20 are used. Additionally, neutral lipids having mixtures of saturated and unsaturated fatty acid chains can be used.

[0594] In some embodiments, the lipid-based carriers comprises one or more neutral lipids, wherein the neutral lipid is selected from the group comprising distearoylphosphatidylcholine (DSPC), dioleoylphosphatidylcholine (DOPC), dipalmitoylphosphatidylcholine (DPPC), dioleoylphosphatidylglycerol (DOPG), dipalmitoylphosphatidylglycerol (DPPG), dioleoyl-phosphatidylethanolamine (DOPE), palmitoyloleoylphosphatidylcholine (POPC), palmitoyloleoyl-phosphatidylethanolamine (POPE) and dioleoyl-phosphatidylethanolamine 4-(N-maleimidomethyl)-cyclohexane-1carboxylate (DOPE-mal), dipalmitoyl phosphatidyl ethanolamine (DPPE), dimyristoylphosphoethanolamine (DMPE), distearoyl-phosphatidylethanolamine (DSPE), 16-O-monomethyl PE, 16-O-dimethyl PE, 18-1-trans PE, 1-stearioyl-2-oleoylphosphatidyethanol amine (SOPE), and 1,2-dielaidoyl-sn-glycero-3-phophoethanolamine (transDOPE), 1,2-diphytanoyl-sn-glycero-3-phosphoethanolamine (DPhyPE), or mixtures thereof.

[0595] In preferred embodiments, the neutral lipid of the lipid-based carriers of the pharmaceutical composition is selected or derived from 1,2-diheptanoyl-sn-glycero-3-phosphocholine (DHPC).

[0596] In other preferred embodiments, the neutral lipid of the lipid-based carriers of the pharmaceutical composition is selected or derived from 1,2-diphytanoyl-sn-glycero-3-phosphoethanolamine (DPhyPE).

[0597] Accordingly, in preferred embodiments, the lipid-based carriers of the pharmaceutical composition comprise a neutral lipid selected or derived from DSPC, DHPC, or DPhyPE. Therefore, in another embodiment, the invention is related to the use of a lipid with high fusogenicity in a lipid-based carrier or nucleic acid-lipid particle, preferably DPhyPE, as depicted here:

[chemical structure]

[0598] In preferred embodiments, the lipid-based carriers, preferably the LNPs of the pharmaceutical composition comprise a neutral lipid selected or derived from 1,2-distearoyl-sn-glycero-3-phosphocholine (DSPC).

[0599] In various embodiments, the molar ratio of the cationic lipid to the neutral lipid in the lipid-based carriers ranges from about 2:1 to about 8:1.

[0600] The neutral lipid is preferably from about 5 mol % to about 90 mol %, about 5 mol % to about 10 mol %, about 5, 10, 15, 20, 25, 30, 35, 40, 45, 50, 55, 60, 65, 70, 75, 80, 85, or about 90 mol % of the total lipid present in the lipid-based carrier. In one embodiment, the lipid-based carrier includes from about 0% to about 15% or 45% on a molar basis of neutral lipid, e.g., from about 3% to about 12% or from about 5% to about 10%. For instance, the lipid-based carrier may include about 15%, about 10%, about 7.5%, or about 7.1% of neutral lipid on a molar basis (based upon 100% total moles of lipid in the lipid-based carrier).

### Steroids, Steroid Analogs or Sterols:

[0601] In preferred embodiments, the lipid-based carriers of the pharmaceutical composition comprise a steroid, steroid analog or sterol.

[0602] Suitably, the steroid, steroid analog or sterol may be derived or selected from cholesterol, cholesteryl hemisuccinate (CHEMS) and a derivate thereof. In other embodiments, the lipid-based carriers of the pharmaceutical composition comprise a steroid, steroid analog or sterol derived from a phytosterol (e.g., a sitosterol, such as beta-sitosterol), preferably from a compound having the structure of Formula I as disclosed in claim 1 of WO2020061332; the disclosure of WO2020061332, especially the disclosure of Formula I and phytosterols being incorporated herewith by reference. In a further embodiment, the steroid is an imidazole cholesterol ester or “ICE” as disclosed in paragraphs [0320] and [0339]-[0340] of WO2019226925A1; WO2019226925A1 being incorporated herein by reference in its entirety.

[0603] In particularly preferred embodiments, the lipid-based carriers of the pharmaceutical composition comprise cholesterol.

[0604] The molar ratio of the cationic lipid to cholesterol in the lipid-based carriers may be in the range from about 2:1 to about 1:1. In some embodiments, the cholesterol may be PEGylated.

[0605] In some embodiments, the lipid-based carrier comprises about 10 mol % to about 60 mol % or about 25 mol % to about 40 mol % sterol (based on 100% total moles of lipids in the lipid-based carrier). In one embodiment, the sterol is about 10, 15, 20, 25, 30, 35, 40, 45, 50, 55, or about 60 mol % of the total lipid present in the lipid-based carrier. In another embodiment, the lipid-based carriers include from about 5% to about 50% on a molar basis of the sterol, e.g., about 15% to about 45%, about 20% to about 40%, about 48%, about 40%, about 38.5%, about 35%, about 34.4%, about 31.5% or about 30% on a molar basis (based upon 100% total moles of lipid in the lipid-based carrier). In preferred embodiments, the lipid-based carrier comprises about 28%, about 29% or about 30% sterol (based on 100% total moles of lipids in the lipid-based carrier). In most preferred embodiments, the lipid-based carrier comprises about 40.9% sterol (based on 100% total moles of lipids in the lipid-based carrier). In another most preferred embodiment, the lipid-based carrier includes from about 28.5% on a molar basis of sterol, preferably cholesterol.

### Aggregation Reducing Lipids/Polymer Conjugated Lipids:

[0606] In preferred embodiments, the lipid-based carriers comprise at least one aggregation reducing lipid or moiety.

[0607] The term “aggregation reducing moiety” refers to a molecule comprising a moiety suitable of reducing or preventing aggregation of the lipid-based carriers.

[0608] The term “aggregation reducing lipid” refers to a molecule comprising both a lipid portion and a moiety suitable of reducing or preventing aggregation of the lipid-based carriers. Under storage conditions or during formulation, the lipid-based carriers may undergo charge-induced aggregation, a condition which can be undesirable for the stability of the lipid-based carriers. Therefore, it can be desirable to include a compound or moiety which can reduce aggregation, for example by sterically stabilizing the lipid-based carriers. Such a steric stabilization may occur when a compound having a sterically bulky but uncharged moiety that shields or screens the charged portions of a lipid-based carriers from close approach to other lipid-based carriers in the composition. In the context of the invention, stabilization of the lipid-based carriers is achieved by including lipids which may comprise a lipid bearing a sterically bulky group which, after formation of the lipid-based carrier, is preferably located on the exterior of the lipid-based carrier. Suitable aggregation reducing groups include hydrophilic groups, e.g. monosialoganglioside GM1, polyamide oligomers (PAO), or certain polymers, such as poly(oxyalkylenes), e.g., poly(ethylene glycol) or poly(propylene glycol).

[0609] Lipids comprising a polymer as aggregation reducing group are herein referred to as “polymer conjugated lipid”.

[0610] The term “polymer conjugated lipid” refers to a molecule comprising both a lipid portion and a polymer portion, wherein the polymer is suitable of reducing or preventing aggregation of lipid-based carriers comprising the RNA. A polymer has to be understood as a substance or material consisting of very large molecules, or macromolecules, composed of many repeating subunits. A suitable polymer in the context of the invention may be a hydrophilic polymer. An example of a polymer conjugated lipid is a PEGylated or PEG-conjugated lipid.

[0611] In preferred embodiments, the lipid-based carriers of the pharmaceutical composition comprise an aggregation reducing lipid selected from a polymer conjugated lipid.

[0612] In preferred embodiments, the polymer conjugated lipid is a PEG-conjugated lipid (or PEGylated lipid, PEG lipid).

[0613] The average molecular weight of the PEG moiety in the PEG-conjugated lipid preferably ranges from about 500 to about 8,000 Daltons (e.g., from about 1,000 to about 4,000 Daltons). In one preferred embodiment, the average molecular weight of the PEG moiety is about 2,000 Daltons.

[0614] In some embodiments, the PEG-conjugated lipid is selected from PEG-modified phosphatidylethanolamine, PEG-modified phosphatidic acid, PEG-modified ceramides (e.g. PEG-CerC14 or PEG-CerC20), PEG-modified dialkylamines, PEG-modified diacylglycerols, PEG-modified dialkylglycerols. Representative polyethylene glycol-lipids include PEG-c-DOMG, PEG-c-DMA, and PEG-s-DMG. In one embodiment, the polyethylene glycol-lipid is N-[(methoxy poly(ethylene glycol) 2000) carbamyl]-1,2-dimyristyloxlpropyl-3-amine (PEG-c-DMA). In a preferred embodiment, the polyethylene glycol-lipid is PEG-2000-DMG. In one embodiment, the polyethylene glycol-lipid is PEG-c-DOMG). In other embodiments, the LNPs comprise a PEGylated diacylglycerol (PEG-DAG) such as 1-(monomethoxy-polyethyleneglycol)-2,3-dimyristoylglycerol (PEG-DMG), a PEGylated phosphatidylethanoloamine (PEG-PE), a PEG succinate diacylglycerol (PEG-S-DAG) such as 4-O-(2′,3′-di (tetradecanoyloxy) propyl-1-O-(w-methoxy (polyethoxy) ethyl) butanedioate (PEG-S-DMG), a PEGylated ceramide (PEG-cer), or a PEG dialkoxypropylcarbamate such as ω-methoxy(polyethoxy)ethyl-N-(2,3di(tetradecanoxy)propyl)carbamate or 2,3-di(tetradecanoxy)propyl-N-(ω-methoxy (polyethoxy)ethyl)carbamate.

[0615] In preferred embodiments, the polymer conjugated lipid, e.g. the PEG-conjugated lipid, is selected or derived from 1,2-dimyristoyl-rac-glycero-3-methoxypolyethylene glycol-2000 (PEG2000 DMG or DMG-PEG 2000). As used in the art, “DMG-PEG 2000” is typically considered a mixture of 1,2-DMG PEG2000 and 1,3-DMG PEG2000 in ˜97:3 ratio.

[0616] In other embodiments, the polymer conjugated lipid, e.g. the PEG-conjugated lipid, is selected or derived from C10-PEG2K, or Cer8-PEG2K.

[0617] In preferred embodiments, the polymer conjugated lipid, e.g. the PEG-conjugated lipid is selected or derived from formula (IVa):

[chemical structure]

[0618] preferably wherein n has a mean value ranging from 30 to 60, such as about 30±2, 32±2, 34±2, 36±2, 38±2, 40±2, 42±2, 44±2, 46±2, 48±2, 50±2, 52±2, 54±2, 56±2, 58±2, or 60±2. In a most preferred embodiment n is about 49. In another very preferred embodiment n is 45. In further preferred embodiments said PEG lipid is of formula (IVa), wherein n is an integer selected such that the average molecular weight of the PEG lipid is about 2000 g/mol to about 3000 g/mol or about 2300 g/mol to about 2700 g/mol. In another preferred embodiment said PEG lipid is of formula (IVa), wherein n is an integer selected such that the average molecular weight of the PEG lipid is about 2000 g/mol.

[0619] The PEG-conjugated lipid of formula IVa as suitably used herein has the chemical 2[(polyethylene glycol)-2000]-N,N-ditetradecylacetamide, also referred to as ALC-0159.

[0620] Accordingly, in preferred embodiments, the aggregation reducing lipid is a PEG-conjugated lipid preferably selected or derived from DMG-PEG 2000, C10-PEG2K, Cer8-PEG2K, or ALC-0159.

[0621] In preferred embodiments, the lipid-based carriers of the pharmaceutical composition comprise a PEG-conjugated lipid ALC-0159.

[0622] In other preferred embodiments, the lipid-based carriers of the pharmaceutical composition comprise an aggregation reducing lipid, wherein the aggregation reducing lipid is not a PEG-conjugated lipid. Accordingly, the aggregation reducing lipid may suitably be selected from a PEG-less lipid, e.g. a PEG-less polymer conjugated lipid.

[0623] In some embodiments, lipid-based carriers include less than about 3, 2, or 1 mole percent of aggregation reducing lipid, based on the total moles of lipid in the lipid-based carrier. In further embodiments, lipid-based carriers comprise from about 0.1% to about 10% of the aggregation reducing lipid on a molar basis, e.g., about 0.5 to about 10%, about 0.5 to about 5%, about 10%, about 5%, about 4%, about 3%, about 2%, about 1.5%, about 1%, about 0.5%, or about 0.3% on a molar basis (based on 100% total moles of lipids in the lipid-based carrier). In other preferred embodiments, lipid-based carriers comprise from about 1.0% to about 2.0% of the aggregation reducing lipid on a molar basis, e.g., about 1.2 to about 1.9%, about 1.2 to about 1.8%, about 1.3 to about 1.8%, about 1.4 to about 1.8%, about 1.5 to about 1.8%, about 1.6 to about 1.8%, in particular about 1.4%, about 1.5%, about 1.6%, about 1.7%, about 1.8%, about 1.9%, most preferably 1.7% (based on 100% total moles of lipids in the lipid-based carrier). In other preferred embodiments, lipid-based carriers comprise about 2.5%, 3%, 3.5%, 4%, 4.5% or 5%, preferably 2.5% of the aggregation reducing lipid on a molar basis (based on 100% total moles of lipids in the lipid-based carrier). In various embodiments, the molar ratio of the cationic lipid to the aggregation reducing lipid ranges from about 100:1 to about 25:1.

[0624] In preferred embodiments, the lipid-based carriers of the pharmaceutical composition comprise an aggregation reducing lipid, wherein the aggregation reducing lipid is not a PEG-conjugated lipid. In preferred embodiments, the aggregation reducing lipid (or polymer conjugated lipid) is a PEG-free lipid that comprises a polymer different from PEG.

[0625] A PEG-free lipid in the context of the invention may be selected or derived from a POZ-lipid. In preferred embodiments, the POZ lipids or respectively preferred polymer conjugated lipids are described in PCT/EP2022/074439, the full disclosure herewith incorporated by reference. In particular, the disclosure relating to polymer conjugated lipids as shown in any one of claims 1 to 8 the disclosure relating to polymer conjugated lipids as shown in any one of claims 9 to 46 of PCT/EP2022/074439 are incorporated by reference.

[0626] In preferred embodiments, the lipid-based carriers of the pharmaceutical composition do not comprise a PEG-conjugated lipid. Accordingly, in further preferred embodiments, the polymer conjugated lipid is a POZ-lipid, which is defined as a compound according to formula (POZ):[H]-[linker]-[M]
[0627] wherein
[0628] [H] is a homopolymer moiety comprising at least one polyoxazoline (POZ) monomer unit

[chemical structure]

[0629] wherein R is C1-9 alkyl or C2-9 alkenyl and n has a mean value ranging from 2 to 200, preferably from 20 to 100, more preferably from 24 to 26 or 45 to 50
[0630] [linker] is an optional linker group, and
[0631] [M] is a lipid moiety.

[0632] In an embodiment in that context, [H] is a heteropolymer moiety or homopolymer moiety comprising multiple monomer units selected from the group consisting of
[0633] poly(2-methyl-2-oxazoline) (PMOZ)

[chemical structure]

[0634] poly(2-ethyl-2-oxazoline) (PEOZ)

[chemical structure]

[0635] poly(2-propyl-2-oxazoline) (PPOZ)

[chemical structure]

[0636] poly(2-butyl-2-oxazoline) (PBOZ)

[chemical structure]

[0637] poly(2-isopropyl-2-oxazoline) (PIPOZ)

[chemical structure]

[0638] poly(2-methoxymethyl-2-oxazoline) (PMeOMeOx), and
[0639] poly(2-dimethylamino-2-oxazoline) (PDMAOx),
[0640] preferably wherein [H] is a homopolymer moiety comprising multiple PMOZ or PEOZ monomer units, more
[0641] preferably wherein [H] comprises or preferably consists of multiple PMOZ monomer units,
[0642] wherein
[0643] (i) n has a mean value ranging from 2 to 200, preferably from 20 to 100, more preferably from 24 to 26 or 45 to 50 or wherein
[0644] (ii) n is selected such that the [H] moiety has an average molecular weight of 1.5 to 22 kDa, more preferably of 2 to 19 kDa, even more preferably of about 7.5 kDa or of about 15 kDa, preferably from 1 to 15 kDa, more preferably of 2 to 12.5 kDa, even more preferably of about 5 kDa or of about 10 kDa.

[0645] In another embodiment in that context, [H] is a heteropolymer moiety or homopolymer moiety comprising multiple monomer units selected from the group consisting of

[chemical structure]

[0646] In yet another embodiment, the [H] from the polymer conjugated lipid according to formula (POZ) is selected from the group consisting of poly(2-methoxymethyl-2-oxazoline) (PMeOMeOx) and poly(2-dimethylamino-2-oxazoline) (PDMAOx).

[0647] In one embodiment, the lipid moiety [M] as shown in formula (POZ) comprises at least one straight or branched, saturated or unsaturated alkyl chain containing from 6 to 30 carbon atoms, preferably wherein the lipid moiety [M] comprises at least one straight or branched saturated alkyl chain, wherein the alkyl chain is optionally interrupted by one or more biodegradable group(s) and/or optionally comprises one terminal biodegradable group, wherein the biodegradable group is selected from the group consisting of but not limited to a pH-sensitive moiety, a zwitterionic linker, non-ester containing linker moieties and ester-containing linker moieties (—C(O)O— or —OC(O)—), amido (—C(O)NH—), disulfide (—S—S—), carbonyl (—C(O)—), ether (—O—), thioether (—S—), oxime (e.g., —C(H)═N—O— or —O—N═C(H)—), carbamate (—NHC(O)O—), urea (—NHC(O)NH—), succinyl (—(O)CCH2CH2C(O)—), succinamidyl (—NHC(O)CH2CH2C(O)NH—), —C(R5)=N—, —N═C(R5)-, —C(R5)=N—O—, —O—N═C(R5)-, —O—C(O)O—, —C(O)N(R5), —N(R5)C(O)—, —C(S)(NR5)-, (NR5)C(S)—, —N(R5)C(O)N(R5)-, —C(O)S—, —SC(O)—, —C(S)O—, —OC(S)—, —OSi(R5)2O—, —C(O)(CR3R4)C(O)O—, or —OC(O)(CR3R4)C(O)—, carbonate (—OC(O)O—), succinoyl, phosphate esters (—O—(O)POH—O—), cyclic compound, heterocyclic compound, piperidine, pyrazine, pyridine, piperazine, and sulfonate esters, as well as combinations thereof, wherein R3, R4 and R5 are, independently H or alkyl (e.g. C1-C4 alkyl).

[0648] In another embodiment, the the lipid moiety [M] comprises at least one straight or branched, saturated or unsaturated alkyl chain comprising 6, 7, 8, 9, 10, 11, 12, 13, 14, 15, 16, 17, 18, 19, 20, 21, 22, 23, 24, 25, 26, 27, 28, 29, or 30 carbon atoms, preferably in the range of 10 to 20 carbon atoms, more preferably in the range of 12 to 18 carbon atoms, even more preferably 14, 16 or 18 carbon atoms, even more preferably 16 or 18 carbon atoms, most preferably 14 carbon atoms, wherein all selections are independent of one another.

[0649] In one embodiment, the linker group [linker] as shown in formula (POZ) is selected from the group consisting of but not limited to a pH-sensitive moiety, a zwitterionic linker, non-ester containing linker moieties and ester-containing linker moieties (—C(O)O— or —OC(O)—), amido (—C(O)NH—), disulfide (—S—S—), carbonyl (—C(O)—), ether (—O—), thioether (—S—), oxime (e.g., —C(H)═N—O— or —O—N═C(H)—), carbamate (—NHC(O)O—), urea (—NHC(O)NH—), succinyl (—(O)CCH2CH2C(O)—), succinamidyl (—NHC(O)CH2CH2C(O)NH—), —C(R5)=N—, —N═C(R5)-, —C(R5)=N—O—, —O—N═C(R5)-, —O—C(O)O—, —C(O)N(R5), —N(R5)C(O)—, —OSi(R5)2O—, —C(O)(CR3R4)C(O)O—, or —OC(O)(CR3R4)C(O)—, carbonate (—OC(O)O—), succinoyl, phosphate esters (—O—(O)POH—O—), and sulfonate esters, as well as combinations thereof, wherein R3, R4 and R5 are, independently H or alkyl (e.g. C1-C4 alkyl).

[0650] In a very preferred embodiment, the polymer conjugated lipid has the structure of

[chemical structure]

[0651] In another very preferred embodiment, the polymer conjugated lipid has the structure of

[chemical structure]

[0652] In another very preferred embodiment, the polymer conjugated lipid has the structure of “PMOZ 2” with n=50 i.e. having 50 monomer repeats.

[0653] In an even further preferred embodiment, the polymer conjugated lipid has the structure of

[chemical structure]

[0654] In another preferred embodiment, the polymer conjugated lipid has the structure of

[chemical structure]

[0655] In an even further very preferred embodiment, the polymer conjugated lipid has the structure of

[chemical structure]

[0656] preferably with n=50 i.e. having 50 monomer repeats, i.e.

[chemical structure]

[0657] For “PMOZ 1” to “PMOZ 5”, preferably n has a mean value ranging from 2 to 200, preferably from 20 to 100, more preferably from 24 to 26, even more preferably about 100, or further even more preferably from 45 to 50, most preferably 50 or wherein n is selected such that the [P] moiety has an average molecular weight of about 4.2 kDa to about 4.4 kDa, or most preferably about 4.3 kDa.

[0658] In another very preferred embodiment, the linker group [linker] comprises preferably an amide linker moiety.

[0659] In a further very preferred embodiment, the linker group [linker] comprises preferably an ester linker moiety.

[0660] In a further very preferred embodiment, the linker group [linker] comprises preferably a succinate linker moiety.

[0661] In another very preferred embodiment, the linker group [linker] comprises both an ester linker and an amid linker moiety. In another preferred embodiment, the linker group [linker] comprises both an ester linker, an amine linker and an amid linker moiety.

[0662] It is noted herein, that all chemical compounds mentioned throughout the whole specification may be produced via processes known to a skilled worker; starting materials and/or reagents used in the processes are obtainable through routine knowledge of a skilled worker on the basis of common general knowledge (e.g. from text books or from e.g. patent applications WO2022173667, WO2009043027, WO2013067199, WO2010006282, WO2009089542, WO2016019340, WO2008106186, WO2020264505, and WO2020023947, the complete disclosure of said patent applications is incorporated by reference herein).

[0663] In yet a further embodiment, the lipid nanoparticle does not comprise a polyethylene glycol-(PEG)-lipid conjugate or a conjugate of PEG and a lipid-like material, and preferably do not comprise PEG and/or (ii) the polymer conjugated lipid of the invention does not comprise a sulphur group (—S—), a terminating nucleophile, and/or is covalently coupled to a biologically active ingredient is a nucleic acid compound selected from the group consisting of RNA, an artificial mRNA, chemically modified or unmodified messenger RNA (mRNA) comprising at least one coding sequence, self-replicating RNA, circular RNA, viral RNA, and replicon RNA; or any combination thereof, preferably wherein the biologically active ingredient is chemically modified mRNA or chemically unmodified mRNA, more preferably wherein the biologically active ingredient is chemically unmodified mRNA.

[0664] In another very preferred embodiment, the polymer conjugated lipid of the invention does not comprise sulphur(S) or a sulphur group (—S—).

[0665] In further preferred embodiments, lipid nanoparticles and/or polymer conjugated lipids may be selected from the lipid nanoparticles and/or lipids as disclosed in PCT/EP2022/074439 (i.e. lipids derived from formula I, II, and Ill of PCT/EP2022/074439, or lipid nanoparticles and/or lipids as specified in claims 1 to 46 of PCT/EP2022/074439), the disclosure of PCT/EP2022/074439 hereby incorporated by reference in its entirety.

[0666] In preferred embodiments, the at least one aggregation-reducing lipid, preferably the PEG-conjugated lipid, is selected or derived from ALC-0159, DMG-PEG 2000, C10-PEG2K, Cer8-PEG2K. In particularly preferred embodiments, the aggregation-reducing lipid is ALC-0159.

[0667] Alternatively, the aggregation reducing lipid is selected or derived a POZ-lipid, which is defined as a compound according to formula (POZ) as defined herein.

[0668] In some embodiments, lipid-based carriers include less than about 3 mol %, 2 mol %, or 1 mol % of aggregation reducing lipid, based on the total moles of lipid in the lipid-based carrier. In further embodiments, lipid-based carriers comprise from about 0.1% to about 10% of the aggregation reducing lipid on a molar basis, e.g. about 0.5% to about 10%, about 0.5% to about 5%, about 10%, about 5%, about 4%, about 3%, about 2%, about 1.5%, about 1%, about 0.5%, or about 0.3% on a molar basis (based on 100% total moles of lipids in the lipid-based carrier). In other preferred embodiments, lipid-based carriers comprise from about 1.0% to about 2.0% of the aggregation reducing lipid on a molar basis, e.g. about 1.2% to about 1.9%, about 1.2% to about 1.8%, about 1.3% to about 1.8%, about 1.4% to about 1.8%, about 1.5% to about 1.8%, about 1.6% to about 1.8%, in particular about 1.4%, about 1.5%, about 1.6%, about 1.7%, about 1.8%, about 1.9%, most preferably 1.7% (based on 100% total moles of lipids in the lipid-based carrier). In other preferred embodiments, lipid-based carriers comprise about 2.5%, 3%, 3.5%, 4%, 4.5% or 5%, preferably 2.5% of the aggregation reducing lipid on a molar basis (based on 100% total moles of lipids in the lipid-based carrier). In various embodiments, the molar ratio of the cationic lipid to the aggregation reducing lipid ranges from about 100:1 to about 25:1.

[0669] Accordingly, in a very preferred embodiment, the lipid-based carriers of the pharmaceutical composition preferably comprises 59 mol % of cationic lipid “C26” (described herein above and/or below), 10 mol % DPhyPE, 28.5 mol % cholesterol and 2.5 mol % PMOZ 4 (described herein above and/or below).

### Other Suitable Cationic or Ionizable, Neutral, Steroid/Sterol or Aggregation Reducing Lipids:

[0670] Other suitable cationic or ionizable, neutral, steroid/sterol or aggregation reducing lipids are disclosed in WO2010053572, WO2011068810, WO2012170889, WO2012170930, WO2013052523, WO2013090648, WO2013149140, WO2013149141, WO2013151663, WO2013151664, WO2013151665, WO2013151666, WO2013151667, WO2013151668, WO2013151669, WO2013151670, WO2013151671, WO2013151672, WO2013151736, WO2013185069, WO2014081507, WO2014089486, WO2014093924, WO2014144196, WO2014152211, WO2014152774, WO2014152940, WO2014159813, WO2014164253, WO2015061461, WO2015061467, WO2015061500, WO2015074085, WO2015105926, WO2015148247, WO2015164674, WO2015184256, WO2015199952, WO2015200465, WO2016004318, WO2016022914, WO2016036902, WO2016081029, WO2016118724, WO2016118725, WO2016176330, WO2017004143, WO2017019935, WO2017023817, WO2017031232, WO2017049074, WO2017049245, WO2017070601, WO2017070613, WO2017070616, WO2017070618, WO2017070620, WO2017070622, WO2017070623, WO2017070624, WO2017070626, WO2017075038, WO2017075531, WO2017099823, WO2017106799, WO2017112865, WO2017117528, WO2017117530, WO2017180917, WO2017201325, WO2017201340, WO2017201350, WO2017201352, WO2017218704, WO2017223135, WO2018013525, WO2018081480, WO2018081638, WO2018089540, WO2018089790, WO2018089801, WO2018089851, WO2018107026, WO2018118102, WO2018119163, WO2018157009, WO2018165257, WO2018170245, WO2018170306, WO2018170322, WO2018170336, WO2018183901, WO2018187590, WO2018191657, WO2018191719, WO2018200943, WO2018231709, WO2018231990, WO2018232120, WO2018232357, WO2019036000, WO2019036008, WO2019036028, WO2019036030, WO2019040590, WO2019089818, WO2019089828, WO2019140102, WO2019152557, WO2019152802, WO2019191780, WO2019222277, WO2019222424, WO2019226650, WO2019226925, WO2019232095, WO2019232097, WO2019232103, WO2019232208, WO2020061284, WO2020061295, WO2020061332, WO2020061367, WO2020081938, WO2020097376, WO2020097379, WO2020097384, WO2020102172, WO2020106903, WO2020146805, WO2020214946, WO2020219427, WO2020227085, WO2020232276, WO2020243540, WO2020257611, WO2020257716, WO2021007278, WO2021016430, WO2021022173, WO2021026358, WO2021030701, WO2021046260, WO2021050986, WO2021055833, WO2021055835, WO2021055849, WO2021127394, WO2021127641, WO2021202694, WO2021231697, WO2021231901, WO2008103276, WO2009086558, WO2009127060, WO2010048536, WO2010054406, WO2010080724, WO2010088537, WO2010129709, WO201021865, WO2011022460, WO2011043913, WO2011090965, WO2011149733, WO2011153120, WO2011153493, WO2012040184, WO2012044638, WO2012054365, WO2012061259, WO2013063468, WO2013086354, WO2013086373, U.S. Pat. Nos. 7,893,302B2, 7,404,969B2, 8,158,601B2, 8,283,333B2, 8,466,122B2, 8,569,256B2, US20100036115, US20110256175, US20120202871, US20120027803, US20120128760, US20130064894, US20130129785, US20130150625, US20130178541, US20130225836, and US20140039032; the disclosures specifically relating to cationic or ionizable, neutral, sterol or aggregation reducing lipids suitable for lipid-based carriers of the foregoing publications are incorporated herewith by reference.

[0671] For example, suitable cationic lipids or cationisable or ionizable lipids include, but are not limited to, DSDMA, N,N-dioleyl-N,N-dimethylammonium chloride (DODAC), N,N-distearyl-N,N-dimethylammonium bromide (DDAB), 1,2-dioleoyltrimethyl ammonium propane chloride (DOTAP) (also known as N-(2,3-dioleoyloxy) propyl)-N,N,N-trimethylammonium chloride and 1,2-Dioleyloxy-3-trimethylaminopropane chloride salt), N-(1-(2,3-dioleyloxy) propyl)-N,N,N-trimethylammonium chloride (DOTMA), N,N-dimethyl-2,3-dioleyloxy) propylamine (DODMA), ckk-E12 (WO2015200465), 1,2-DiLinoleyloxy-N,N-dimethylaminopropane (DLinDMA), 1,2-Dilinolenyloxy-N,N-dimethylaminopropane (DLenDMA), 1,2-di-y-linolenyloxy-N,N-dimethylaminopropane (γ-DLenDMA), 98N12-5, 1,2-Dilinoleylcarbamoyloxy-3-dimethylaminopropane (DLin-C-DAP), ICE (Imidazol-based), HGT5000, HGT5001, DMDMA, CLinDMA, CpLinDMA, DMOBA, DOcarbDAP, DLincarbDAP, DLinCDAP, KLin-K-DMA, DLin-K-XTC2-DMA, XTC (2,2-Dilinoleyl-4-dimethylaminoethyl-[1,3]-dioxolane) HGT4003, 1,2-Dilinoleoyl-3-trimethylaminopropane chloride salt (DLin-TAP.Cl), 1,2-Dilinoleyloxo-3-(2-N,N-dimethylamino) ethoxypropane (DLin-EG-DM A), 2,2-Dilinoleyl-4-dimethylaminomethyl-[1,3]-dioxolane (DLin-K-DMA), (6Z,9Z,28Z,31Z)-heptatriaconta-6,9,28,31-tetraen-19-yl-4-(dimethylamino) butanoate (MC3, US20100324120), ALNY-100 ((3aR,5s,6aS)-N,N-dimethyl-2,2-di((9Z,12Z)-octadeca-9,12-dienyl) tetrahydro-3aH-cyclopenta[d][1,3]dioxol-5-amine)), NC98-5 (4,7,13-tris(3-oxo-3-(undecylamino) propyl)-N,N 16-diundecyl-4,7,10,13-tetraazahexadecane-1,16-diamide), (6Z,9Z,28Z,31Z)-heptatriaconta-6,9,28,31-tetraen-19-yl 4-(dimethylamino) butanoate (DLin-M-C3-DMA), 3-((6Z,9Z,28Z,31Z)-heptatriaconta-6,9,28,31-tetraen-19-yloxy)-N,N-dimethylpropan-1-amine (MC3 Ether), 4-((6Z,9Z,28Z,31Z)-heptatriaconta-6,9,28,31-tetraen-19-yloxy)-N,N-dimethylbutan-1-amine (MC4 Ether), LIPOFECTIN® (commercially available cationic liposomes comprising DOTMA and 1,2-dioleoyl-sn-3phosphoethanolamine (DOPE), from GIBCO/BRL, Grand Island, N.Y.); LIPOFECTAMINE® (commercially available cationic liposomes comprising N-(1-(2,3dioleyloxy) propyl)-N-(2-(sperminecarboxamido) ethyl)-N,N-dimethylammonium trifluoroacetate (DOSPA) and (DOPE), from GIBCO/BRL); and TRANSFECTAM® (commercially available cationic lipids comprising dioctadecylamidoglycyl carboxyspermine (DOGS) in ethanol from Promega Corp., Madison, Wis.) or any combination of any of the foregoing. Further suitable cationic or ionizable lipids include those described in international patent publications WO2010053572 (and particularly, 1,1′-(2-(4-(2-((2-(bis(2-hydroxydodecyl)amino)ethyl)(2-hydroxydodecyl)amino)ethyl)piperazin-1-yl)ethylazanediyl)didodecan-2-ol (C12-200) described at paragraph [00225] of WO2010053572) and WO2012170930, both of which are incorporated herein by reference, HGT4003, HGT5000, HGTS001, HGT5001, HGT5002 (see US2015140070), 1,2-dilinoleyoxy-3-(dimethylamino) acetoxypropane (DLin-DAC), 1,2-dilinoleyoxy-3morpholinopropane (DLin-MA), 1,2-dilinoleoyl-3-dimethylaminopropane (DLinDAP), 1,2-dilinoleylthio-3-dimethylaminopropane (DLin-S-DMA), 1-linoleoyl-2-linoleyloxy-3dimethylaminopropane (DLin-2-DMAP), 1,2-dilinoleyloxy-3-trimethylaminopropane chloride salt (DLin-TMA.Cl), 1,2-dilinoleyloxy-3-(N-methylpiperazino) propane (DLin-MPZ), 3-(N,N-dilinoleylamino)-1,2-propanediol (DLinAP), 3-(N,N-dioleylamino)-1,2-propanediol (DOAP), 1,2-dilinoleyloxo-3-(2-N,N-dimethylamino) ethoxypropane (DLin-EG-DMA), 2,2-dilinoleyl-4-(2-dimethylaminoethyl)-[1,3]-dioxolane (DLin-KC2-DMA, WO2010042877); dilinoleyl-methyl-4-dimethylaminobutyrate (DLin-MC3-DMA).

### Lipid-Based Carrier Compositions:

[0672] In preferred embodiments, the lipid-based carriers of the pharmaceutical composition comprise at least one nucleic acid, preferably at least one RNA encoding a transcription factor inhibitor as defined herein, a cationic lipid as defined herein, an aggregation reducing lipid as defined herein, optionally, a neutral lipid as defined herein, and, optionally, a steroid or steroid analog as defined herein.

[0673] In embodiments, the lipid-based carriers comprising the at least one nucleic acid, preferably the at least one RNA comprise
[0674] (i) at least one cationic lipid or ionizable lipid, preferably as defined herein;
[0675] (ii) at least one neutral lipid or phospholipid, preferably as defined herein;
[0676] (iii) at least one steroid or steroid analogue, preferably as defined herein; and
[0677] (iv) at least one aggregation reducing lipid, preferably as defined herein.

[0678] In other embodiments, the lipid-based carriers comprising the at least one nucleic acid, preferably the at least one RNA comprise
[0679] (i) at least one cationic lipid or ionizable lipid, preferably as defined herein;
[0680] (ii) at least one neutral lipid or phospholipid, preferably as defined herein or at least one steroid or steroid analogue, preferably as defined herein; and
[0681] (iii) at least one aggregation reducing lipid, preferably as defined herein.

[0682] In preferred embodiments, the lipid-based carriers comprising the at least one nucleic acid, preferably the at least one RNA comprise
[0683] (i) at least one cationic lipid selected or derived from ALC-0315, SM-102, SS-33/4PE-15, HEXA-C5DE-PipSS or compound C26 (see C26 in Table 1 of WO2021123332);
[0684] (ii) at least one neutral lipid selected or derived from DSPC, DHPC, or DPhyPE;
[0685] (iii) at least one steroid or steroid analog selected or derived from cholesterol; and
[0686] (iv) at least one aggregation reducing lipid selected or derived from DMG-PEG 2000, C10-PEG2K, Cer8-PEG2K, or ALC-0159 or “PMOZ 4”; and wherein the lipid-based carriers encapsulate the nucleic acid (e.g. the RNA).

[0687] In a preferred embodiment, the lipid-based carriers comprising the at least one nucleic acid, preferably the at least one RNA comprise
[0688] (i) at least one cationic lipid selected or derived from ALC-0315;
[0689] (ii) at least one neutral lipid selected or derived from DSPC;
[0690] (iii) at least one steroid or steroid analog selected or derived from cholesterol; and
[0691] (iv) at least one aggregation reducing lipid selected or derived from ALC-0159; and wherein the lipid-based carriers encapsulate the nucleic acid (e.g. the RNA).

[0692] In preferred embodiments, the cationic lipids (as defined herein), neutral lipid (as defined herein), steroid or steroid analog (as defined herein), and/or aggregation reducing lipid (as defined herein) may be combined at various relative ratios.

[0693] In preferred embodiments, the lipid-based carriers comprise (i) to (iv) in a molar ratio of about 20-60% cationic lipid or ionizable lipid, about 5-25% neutral lipid, about 25-55% steroid or steroid analogue, and about 0.5-15% aggregation reducing lipid e.g. polymer conjugated lipid, preferably wherein the lipid-based carriers encapsulate the nucleic acid (e.g. the RNA).

[0694] For example, the ratio of cationic lipid or ionizable lipid to neutral lipid to steroid or steroid analogue to aggregation reducing lipid may be between about 30-60:20-35:20-30:1-15, or at a ratio of about 40:30:25:5, 50:25:20:5, 50:20:25:5, 50:27:20:3, 40:30:20:10, 40:32:20:8, 40:32:25:3 or 40:33:25:2, respectively.

[0695] In preferred embodiments, the lipid-based carriers, preferably the LNPs comprising at least one RNA of the first aspect comprise
[0696] at least one cationic lipid selected from SM-102;
[0697] at least one neutral lipid selected from DSPC;
[0698] at least one steroid or steroid analogue selected from cholesterol; and
[0699] at least one aggregation reducing lipid selected from DMG-PEG 2000 or “PMOZ 4”;
[0700] and
[0701] wherein the lipid-based carriers encapsulate the RNA, preferably wherein i) to (iv) are n a weight ratio of about 50% cationic lipid, about 10% neutral lipid, about 38.5% steroid or steroid analogue, and about 1.5% aggregation reducing lipid,
[0702] preferably wherein the lipid-based carriers encapsulate the RNA. Such LNPs are herein referred to as SM-102-LNPs.

[0703] In preferred embodiments, the lipid-based carriers, preferably the LNPs comprising at least one RNA of the first aspect comprise
[0704] at least one cationic lipid selected from SM-102;
[0705] at least one neutral lipid selected from DSPC;
[0706] at least one steroid or steroid analogue selected from cholesterol; and
[0707] at least one aggregation reducing lipid selected from DMG-PEG 2000 or “PMOZ 4”;
[0708] and
[0709] wherein the lipid-based carriers encapsulate the RNA, preferably wherein i) to (iv) are n a weight ratio of about 48.5% cationic lipid, about 11.1% neutral lipid, about 38.9% steroid or steroid analogue, and about 1.5% aggregation reducing lipid,
[0710] preferably wherein the lipid-based carriers encapsulate the RNA. A preferred N/P ratio for this formulation is about 4.85 (lipid to RNA mol ratio). Such LNPs are herein referred to as SM-102-LNPs.

[0711] In preferred embodiments, the lipid-based carriers, preferably the LNPs comprising the at least one nucleic acid, preferably the at least one RNA comprise
[0712] (i) at least one cationic lipid selected from SS-33/4PE-15, HEXA-C5DE-PipSS or compound C26 (see C26 in Table 1 of WO2021123332);
[0713] (ii) at least one neutral lipid selected from DPhyPE;
[0714] (iii) at least one steroid or steroid analog selected from cholesterol; and
[0715] (iv) at least one aggregation reducing lipid selected from DMG-PEG 2000 or most preferably “PMOZ 4”
[0716] and wherein the lipid-based carriers encapsulate the RNA, preferably wherein the lipid-based carriers encapsulate the nucleic acid (e.g. the RNA). Such LNPs are herein referred to as GN-LNPs.

[0717] In another preferred embodiment, lipid-based carriers, preferably the LNPs comprising the nucleic acid (e.g. the RNA) comprise 59 mol % HEXA-C5DE-PipSS lipid (see compound C2 in Table 1 of WO2021123332) as cationic lipid or preferably 59 mol % compound C26 (see C26 in Table 1 of WO2021123332), 10 mol % DPhyPE as neutral lipid, 29.3 mol % cholesterol as steroid and 1.7 mol % DMG-PEG 2000 as aggregation reducing lipid, or further preferably 59 mol % compound C26 (see C26 in Table 1 of WO2021123332), 10 mol % DPhyPE as neutral lipid, 28.5 mol % cholesterol as steroid and 2.5 mol % aggregation reducing lipid, preferably DMG-PEG 2000 or most preferably “PMOZ 4”.

[0718] In particularly preferred embodiments, the lipid-based carriers, preferably the LNPs comprising the at least one nucleic acid, preferably the at least one RNA, comprise
[0719] (i) at least one cationic lipid selected from ALC-0315;
[0720] (ii) at least one neutral lipid selected from DSPC;
[0721] (iii) at least one steroid or steroid analog selected from cholesterol; and
[0722] (iv) at least one aggregation reducing lipid selected from ALC-0159 and wherein the lipid-based carriers encapsulate the nucleic acid (e.g. the RNA), preferably wherein i) to (iv) are in a molar ratio of about 47.4% cationic lipid, about 10% neutral lipid, about 40.9% steroid or steroid analogue, and about 1.7% aggregation reducing lipid, preferably wherein the lipid-based carriers encapsulate the nucleic acid (e.g. the RNA). Such LNPs are herein referred to as 315-LNPs.

[0723] In particularly preferred embodiments, the lipid-based carriers, preferably the LNPs comprising the at least one nucleic acid, preferably the at least one RNA, comprise
[0724] (i) at least one cationic lipid selected from ALC-0315;
[0725] (ii) at least one neutral lipid selected from DSPC;
[0726] (iii) at least one steroid or steroid analog selected from cholesterol; and
[0727] (iv) at least one aggregation reducing lipid selected from ALC-0159 and wherein the lipid-based carriers encapsulate the nucleic acid (e.g. the RNA), preferably wherein i) to (iv) are in a molar ratio of about 47.4% cationic lipid, about 10% neutral lipid, about 40.9% steroid or steroid analogue, and about 1.7% aggregation reducing lipid, preferably wherein the lipid-based carriers encapsulate the nucleic acid (e.g. the RNA). Such LNPs are herein referred to as 315-LNPs. In such preferred embodiments, the RNA is preferably an mRNA that comprises a cap1 structure and an RNA sequence that is not chemically modified (e.g. consisting of non-modified ribonucleotides).

[0728] In particularly preferred embodiments, the lipid-based carriers, preferably the LNPs comprising the at least one nucleic acid, preferably the at least one RNA, comprise
[0729] (i) at least one cationic lipid selected from ALC-0315;
[0730] (ii) at least one neutral lipid selected from DSPC;
[0731] (iii) at least one steroid or steroid analog selected from cholesterol; and
[0732] (iv) at least one aggregation reducing lipid selected from ALC-0159 and wherein the lipid-based carriers encapsulate the nucleic acid (e.g. the RNA), preferably wherein i) to (iv) are in a molar ratio of about 47.4% cationic lipid, about 10% neutral lipid, about 40.9% steroid or steroid analogue, and about 1.7% aggregation reducing lipid, preferably wherein the lipid-based carriers encapsulate the nucleic acid (e.g. the RNA). Such LNPs are herein referred to as 315-LNPs. In such preferred embodiments, the RNA is preferably an mRNA that comprises a cap1 structure and an RNA sequence wherein all uracils are substituted by pseudouridine (ψ) or N (1)-methylpseudouridine (m1ψ).

[0733] In particular preferred embodiments, 315 LNPs and 315-like LNPs are used herein for treating eye disease

[0734] In particular preferred embodiments, the pharmaceutical composition comprises lipid nanoparticles (LNPs) which have a molar ratio of approximately 50:10:38.5:1.5, preferably 47.5:10:40.8:1.7 or more preferably 47.4:10:40.9:1.7 (i.e. proportion (mol %) of cationic lipid (preferably above mentioned lipid III-3 (ALC-0315)), DSPC, cholesterol and PEG-lipid (preferably above mentioned PEG-lipid of formula (IVa) with n=49, even more preferably above mentioned PEG-lipid of formula (IVa) with n=45 (ALC-0159)); solubilized in ethanol).

[0735] In preferred embodiments, the wt/wt ratio of lipid to nucleic acid (e.g. RNA) in the lipid-based carrier is from about 10:1 to about 60:1, e.g. about 40:1. In particularly preferred embodiments, the wt/wt ratio of lipid to nucleic acid is from about 20:1 to about 30:1, e.g. about 25:1. In other preferred embodiments, the wt/wt ratio of lipid to nucleic acid is in the range of 20 to 60, preferably from about 3 to about 15, about 5 to about 13, about 4 to about 8 or from about 7 to about 11.

[0736] The amount of lipid comprised in the lipid-based carriers may be selected taking the amount of the nucleic acid cargo into account. In one embodiment, these amounts are selected such as to result in an N/P ratio of the lipid-based carriers encapsulating the nucleic acid in the range of about 0.1 to about 20. The N/P ratio is defined as the mole ratio of the nitrogen atoms (“N”) of the basic nitrogen-containing groups of the lipid to the phosphate groups (“P”) of the nucleic acid which is used as cargo. The N/P ratio may be calculated on the basis that, for example, 1 μg nucleic acid typically contains about 3 nmol phosphate residues, provided that the nucleic acid exhibits a statistical distribution of bases. The “N”-value of the lipid or lipidoid may be calculated on the basis of its molecular weight and the relative content of permanently cationic and—if present—cationisable groups.

[0737] In embodiments, the N/P ratio can be in the range of about 1 to about 50. In other embodiments, the range is about 1 to about 20, and preferably about 1 to about 15. For “GN-LNPs”, a suitable N/P (lipid to nucleic acid mol ratio) is about 14 or about 17. For “315 LNPs”, a suitable N/P (lipid to nucleic acid mol ratio) is about 6. Another preferred N/P ratio is about 4.85 or 5 (lipid to RNA mol ratio).

[0738] In particularly preferred embodiments, the pharmaceutical composition comprises at least one RNA encoding at least one transcription factor inhibitor, wherein the transcription factor inhibitor, preferably the RUNX inhibitor, comprises or consists of an amino acid sequence being identical or at least 90%, 91%, 92%, 93%, 94%, 95%, 96%, 97%, 98%, or 99% identical to any one of SEQ ID NO: 232, or fragments or variants thereof, wherein the nucleic acid is encapsulated in lipid based carriers, preferably in GN-LNPs as defined herein or 315 LNPs as defined herein, wherein 315 LNPs are particularly preferred Alternatively in that context, the nucleic acid is encapsulated in SM-102 LNPs as defined herein.

[0739] In particularly preferred embodiments, the pharmaceutical composition comprises at least one RNA that comprises or consists of a nucleic acid sequence which is identical or at least 90%, 91%, 92%, 93%, 94%, 95%, 96%, 97%, 98%, or 99% identical to a nucleic acid sequence selected from SEQ ID NOs: 1579 or 1580, or a fragment or variant of that sequence, wherein the nucleic acid is encapsulated in lipid based carriers, preferably in GN-LNPs as defined herein or 315 LNPs as defined herein, wherein 315 LNPs are particularly preferred Alternatively in that context, the nucleic acid is encapsulated in SM-102 LNPs as defined herein.

[0740] In particularly preferred embodiments, the pharmaceutical composition comprises at least one RNA that comprises or consists of a nucleic acid sequence which is identical or at least 90%, 91%, 92%, 93%, 94%, 95%, 96%, 97%, 98%, or 99% identical to a nucleic acid sequence selected from SEQ ID NO: 1580, or a fragment or variant of that sequence, wherein the nucleic acid is encapsulated in lipid based carriers, preferably in GN-LNPs as defined herein or 315 LNPs as defined herein, wherein 315 LNPs are particularly preferred. Alternatively in that context, the nucleic acid is encapsulated in SM-102 LNPs as defined herein.

[0741] In various embodiments, the pharmaceutical composition comprises lipid-based carriers (encapsulating nucleic acid, preferably RNA as defined herein) that have a defined size (particle size, homogeneous size distribution).

[0742] The size of the lipid-based carriers of the pharmaceutical composition is typically described herein as Z-average size. The terms “average diameter”, “mean diameter”, “diameter” or “size” for particles (e.g. lipid-based carrier) are used synonymously with the value of the Z-average. The term “Z-average size” refers to the mean diameter of particles as measured by dynamic light scattering (DLS) with data analysis using the so-called cumulant algorithm, which provides as results the so-called Z-average with the dimension of a length, and the polydispersity index (PI), which is dimensionless (Koppel, D., J. Chem. Phys. 57, 1972, pp 4814-4820, ISO 13321).

[0743] The term “dynamic light scattering” or “DLS” refers to a method for analyzing particles in a liquid, wherein the liquid is typically illuminated with a monochromatic light source and wherein the light scattered by particles in the liquid is detected. DLS can thus be used to measure particle sizes in a liquid. Suitable DLS protocols are known in the art. DLS instruments are commercially available (such as the Zetasizer Nano Series, Malvern Instruments, Worcestershire, UK). DLS instruments employ either a detector at 90° (e.g., DynaPro® NanoStar® from Wyatt Technology or Zetasizer Nano S90® from Malvern Instruments) or a backscatter detection system at 173° (e.g., Zetasizer Nano S® from Malvern Instruments) and at 158° (DynaPro Plate Reader® from Malvern Instruments) close to the incident light of 180°. Typically, DLS measurements are performed at a temperature of about 25° C. DLS is also used in the context of the present invention to determine the polydispersity index (PDI) and/or the main peak diameter of the lipid-based carriers incorporating nucleic acid (e.g. RNA).

[0744] In various embodiments, the lipid-based carriers of the pharmaceutical composition encapsulating the nucleic acid (e.g. RNA) have a Z-average size ranging from about 50 nm to about 200 nm, from about 50 nm to about 190 nm, from about 50 nm to about 180 nm, from about 50 nm to about 170 nm, from about 50 nm to about 160 nm, 50 nm to about 150 nm, 50 nm to about 140 nm, 50 nm to about 130 nm, 50 nm to about 120 nm, 50 nm to about 110 nm, 50 nm to about 100 nm, 50 nm to about 90 nm, 50 nm to about 80 nm, 50 nm to about 70 nm, 50 nm to about 60 nm, 60 nm to about 200 nm, from about 60 nm to about 190 nm, from about 60 nm to about 180 nm, from about 60 nm to about 170 nm, from about 60 nm to about 160 nm, 60 nm to about 150 nm, 60 nm to about 140 nm, 60 nm to about 130 nm, 60 nm to about 120 nm, 60 nm to about 110 nm, 60 nm to about 100 nm, 60 nm to about 90 nm, 60 nm to about 80 nm, or 60 nm to about 70 nm, for example about 50 nm, 55 nm, 60 nm, 65 nm, 70 nm, 75 nm, 80 nm, 85 nm, 90 nm, 95 nm, 100 nm, 105 nm, 110 nm, 115 nm, 120 nm, 125 nm, 130 nm, 135 nm, 140 nm, 145 nm, 150 nm, 160 nm, 170 nm, 180 nm, 190 nm, or 200 nm.

[0745] In preferred embodiments, the lipid-based carriers of the pharmaceutical composition encapsulating the nucleic acid (e.g. RNA) have a Z-average size ranging from about 50 nm to about 200 nm, preferably in a range from about 50 nm to about 150 nm, more preferably from about 50 nm to about 120 nm.

[0746] Preferably, the pharmaceutical composition comprises less than about 10%, 9%, 8%, 7%, 6%, 5%, 4%, 3%, 2%, 1% lipid-based carriers that have a particle size exceeding about 500 nm.

[0747] Preferably, the pharmaceutical composition comprises less than about 10%, 9%, 8%, 7%, 6%, 5%, 4%, 3%, 2%, 1% LNPs that have a particle size smaller than about 20 nm.

[0748] Preferably, at least about 80%, 85%, 90%, 95% of lipid-based carriers have a spherical morphology.

[0749] In preferred embodiments, the polydispersity index (PDI) of the lipid-based carriers is typically in the range of 0.1 to 0.5. In a particular embodiment, a PDI is below 0.2. Typically, the PDI is determined by dynamic light scattering.

[0750] In preferred embodiments, 80% of the nucleic acid (e.g. RNA) comprised in the pharmaceutical composition is encapsulated in lipid-based carriers, preferably 85% of the nucleic acid (e.g. RNA) comprised in the pharmaceutical composition is encapsulated in lipid-based carriers, more preferably 90% of the nucleic acid (e.g. RNA) comprised in the pharmaceutical composition is encapsulated in lipid-based carriers, most preferably 95% of the nucleic acid (e.g. RNA) comprised in the pharmaceutical composition is encapsulated in lipid-based carriers. The percentage of encapsulation may be determined by a RiboGreen assay as known in the art.

[0751] The lipid-based carriers of the pharmaceutical composition have been prepared using according to the general procedures described in PCT Pub. Nos. WO2015199952, WO2017004143 and WO2017075531, the full disclosures of which are incorporated herein by reference.

[0752] According to a preferred embodiments the lipid-based carriers, preferably the LNPs encapsulating or comprising the nucleic acid (e.g. RNA), are purified by at least one purification step, preferably by at least one step of TFF and/or at least one step of clarification and/or at least one step of filtration.

[0753] Accordingly, in preferred embodiments, the pharmaceutical composition comprises purified lipid-based carriers encapsulating an mRNA encoding the transcription factor inhibitor as defined herein.

### Antagonists of RNA Sensing Pattern Recognition Receptors:

[0754] In preferred embodiments, in particular in embodiments where the nucleic acid of the composition is an RNA, the pharmaceutical composition may comprise at least one antagonist of at least one RNA sensing pattern recognition receptor.

[0755] In preferred embodiments in that context, the pharmaceutical composition comprises at least one antagonist of at least one RNA sensing pattern recognition receptor selected from a Toll-like receptor, preferably a TLR7 antagonist and/or a TLR8 antagonist.

[0756] Suitable antagonist of at least one RNA sensing pattern recognition receptor are disclosed in published PCT patent application WO2021028439, the full disclosure herewith incorporated by reference. In particular, the disclosure relating to suitable antagonist of at least one RNA sensing pattern recognition receptors as defined in any one of the claims 1 to 94 of WO2021028439 are incorporated by reference.

[0757] In preferred embodiments, the at least one antagonist of at least one RNA sensing pattern recognition receptor is a single stranded oligonucleotide that comprises or consists of a nucleic acid sequence being identical or at least 90%, 91%, 92%, 93%, 94%, 95%, 96%, 97%, 98%, or 99% identical to a nucleic acid sequence selected from the group consisting of SEQ ID NOs: 85-212 of WO2021028439, or fragments of any of these sequences. A particularly preferred antagonist in that context is 5′-GAG CGmG CCA-3′ (SEQ ID NO: 85 of WO2021028439), or a fragment or variant thereof.

[0758] In preferred embodiments, the molar ratio of the at least one antagonist of at least one RNA sensing pattern recognition receptor to the at least one RNA suitably ranges from about 20:1 to about 80:1.

[0759] In preferred embodiments, the weight to weight ratio of the at least one antagonist of at least one RNA sensing pattern recognition receptor to the at least one RNA suitably ranges from about 1:2 to about 1:10.

[0760] In embodiments, the at least one antagonist of at least one RNA sensing pattern recognition receptor and the at least one RNA encoding are separately formulated in the lipid-based carriers as defined herein or co-formulated in the lipid-based carriers as defined herein.

### Other Inhibitors:

[0761] In embodiments, the pharmaceutical composition additionally comprises at least one small molecule inhibitor or an inhibitory nucleic acid (siRNA) of the target transcription factor, preferably a small molecule inhibitor or an inhibitory nucleic acid (siRNA) of RUNX.

[0762] For example, any of the inhibitors of RUNX may be used that are provided in WO2019099560, WO2018093797, WO2019099595, and WO2021216378, the full disclosure herewith incorporated by reference. A suitable small molecule is ro5-3335 (see e.g. WO2018093797). The CAS Registry Number for Ro5-3335 is 30195-30-3.

### Presentation of the Pharmaceutical Composition:

[0763] In preferred embodiments, the pharmaceutical composition is a liquid composition or a dried composition.

[0764] In preferred embodiments, the pharmaceutical composition is a lyophilized, a spray-dried or a spray-freeze dried composition. The pharmaceutical composition is lyophilized (e.g. according to WO2016165831 or WO2011069586) to yield a temperature stable and dried composition. The pharmaceutical composition may also be dried using spray-drying or spray-freeze drying (e.g. according to WO2016184575 or WO2016184576) to yield a temperature stable dried composition.

[0765] Lyoprotectants for lyophilization and or spray drying may be selected from trehalose, sucrose, mannose, dextran and inulin. A preferred lyoprotectant is sucrose, optionally comprising a further lyoprotectant. A further preferred lyoprotectant is trehalose, optionally comprising a further lyoprotectant. Accordingly, the pharmaceutical composition may comprise at least one lyoprotectant.

[0766] In preferred embodiments, the pharmaceutical composition is a liquid composition or a lyophilized/spray-dried composition reconstituted in a liquid carrier.

[0767] In preferred embodiments, the pharmaceutical composition is a liquid composition.

[0768] In preferred embodiments, the pharmaceutical composition (or the liquid carrier) comprises at least one sugar preferably in a concentration of about 50 mM to about 300 mM, and/or a at least one salt preferably in a concentration of about 10 mM to about 200 mM, and/or at least one buffering agent. In preferred embodiments, the pharmaceutical composition (or the liquid carrier) has a pH in a range of about pH 7.0 to about pH 8.0.

### Administration of the Pharmaceutical Composition or the Nucleic Acid

[0769] Suitably, upon administration of the pharmaceutical composition or nucleic acid to a cell, tissue, or subject, the transcription factor inhibitor, e.g. the RUNX inhibitor, is produced in an amount sufficient for reducing and/or inhibiting the activity of the target transcription factor in said cell, tissue, or subject.

[0770] In preferred embodiments, upon intramuscular, intranasal, transdermal, intradermal, intralesional, intracranial, subcutaneous, intracardial, intratumoral, intravenous, intrapulmonal, intraarticular, sublingual, pulmonary, intrathecal, or ocular administration of the pharmaceutical composition or nucleic acid to a cell, tissue, or subject, the transcription factor inhibitor is produced, preferably in an amount sufficient for reducing and/or inhibiting the activity of the target transcription factor in said cell, tissue, or subject.

[0771] In preferred embodiments, upon local administration of the pharmaceutical composition or nucleic acid to a cell, tissue, or subject, the transcription factor inhibitor is produced, preferably in an amount sufficient for reducing and/or inhibiting the activity of the target transcription factor in said cell, tissue, or subject.

[0772] In preferred embodiments, the administration of the pharmaceutical composition or nucleic acid is an ocular administration, preferably in an amount sufficient for reducing and/or inhibiting the activity of the target transcription factor in said cell, tissue, or subject.

[0773] In preferred embodiments, the ocular administration is selected from topical, intravitreal, intracameral, subconjunctival, subretinal, subtenon, retrobulbar, orbital, topical, suprachoroidal, posterior juxtascleral, or intraoperative administration (e.g. during an ocular surgery), preferably intravitreal or intraoperative administration.

[0774] In another embodiment, the ocular administration may be via a device, for example a device for intravitreal delivery.

[0775] Suitably, the device is configured to be a depot for the pharmaceutical composition. Such a device allows controlled administration to the eye (e.g. in regular intervals, e.g. one a day) e.g. via a port.

[0776] Suitably, ocular administration of the pharmaceutical composition or nucleic acid (e.g. an RNA encoding a RUNX inhibitor) leads to a production of the encoded target transcription factor inhibitor in an amount sufficient for reducing and/or inhibiting the activity of the target transcription factor (e.g. RUNX) in cells and/or tissues of the eye.

[0777] In preferred embodiments in that context, the ocular administration is intravitreal administration.

[0778] Intravitreal administration e.g. via injection is one of the most common ways of administering a medicament into an eye. Accordingly, administration of the pharmaceutical composition or nucleic acid (e.g. an RNA encoding a RUNX inhibitor) via intravitreal administration is preferred in medical applications where a transcription factor is to be inhibited in the eye, for example RUNX.

[0779] In the context of intravitreal administration, a preferred injection volume of the pharmaceutical composition is ranging from about 25 μl to about 150 μl, preferably from about 25 μl to about 100 μl, more preferably from about 50 μl to about 100 μl. In a particularly preferred embodiment, the injection volume is about 50 μl.

[0780] In preferred embodiments in that context, the ocular administration is intraoperative administration. Some disease, disorders or conditions in the eye occur after an ocular surgery or operation (e.g. PVR). Accordingly, administration of the pharmaceutical composition or nucleic acid (e.g. an RNA encoding a RUNX inhibitor) via intraoperative administration is preferred in medical applications where a transcription factor is to be inhibited in the eye, for example RUNX, that is associated with a disease, disorders or condition that occurs after an ocular surgery or operation.

[0781] In preferred embodiments in that context, ocular administration of the pharmaceutical composition or the nucleic acid leads to a production of the transcription factor inhibitor (e.g. RUNX inhibitor) in cells and/or tissues of the eye, preferably in cells and/or tissues selected from cornea, lens, ciliary body, vitreous, sclera, choroid, retina, optic nerve, macula, scleral cells, choroid plexus epithelial cells, retinal cells, inflammatory cells, retinal pigment epithelium, Bruch's membrane, and retinal or choridial blood vessels.

[0782] In particularly preferred embodiments, ocular administration of the pharmaceutical composition or the nucleic acid (e.g. an RNA encoding a RUNX inhibitor) leads to a production of the transcription factor inhibitor (e.g. RUNX inhibitor) in retinal pigment epithelium (RPE) cells.

[0783] The retinal pigment epithelium (RPE) is the pigmented cell layer just outside the neurosensory retina that nourishes retinal visual cells and is firmly attached to the underlying choroid and overlying retinal visual cells. The RPE forms a monolayer of cells beneath the sensory retina that is normally mitotically inactive except when it is participating in retinal wound repair, where it plays a central role. When wound repair is complete, the RPE usually stops proliferating; failure to do so can result in blinding disorders such as e.g. proliferative vitreoretinopathy (PVR) and disciform scarring. For instance, after detachment of the sensory retina, the RPE changes in morphology and begins to proliferate. Multilayered colonies of dedifferentiated and transdifferentiated RPE cells are formed. In some instances, cells migrate onto the surface of the retina and form epiretinal membranes. These events have been implicated in the pathogenesis of proliferative vitreoretinopathy, severe scarring occurring in association with exudative macular degeneration, and poor or delayed recovery of vision after retinal reattachment.

[0784] Accordingly for some disease, disorders or conditions (e.g. PVR) it is preferred that the transcription factor inhibitor (e.g. RUNX inhibitor) is produced in RPE cells upon ocular administration to e.g. inhibit an overactive and/or overexpressed transcription factor (e.g. RUNX).

[0785] In particularly preferred embodiments in that context, ocular administration of the pharmaceutical composition or the nucleic acid (e.g. an RNA encoding a RUNX inhibitor) leads to a production of the transcription factor inhibitor (e.g. RUNX inhibitor) in retinal cells selected from photoreceptor cells, bipolar cells, ganglion cells, horizontal cells, Muller cells, mural cells, microglia, and amacrine cells. Particularly preferred are Muller cells, and microglia.

[0786] In some embodiments, the ocular administration of the pharmaceutical composition or the nucleic acid (e.g. an RNA encoding a RUNX inhibitor) is performed into a tamponade agent-filled human eye.

[0787] In the context of ocular surgery (e.g. to treat retinal detachment) tamponade agents are used to provide surface tension across retinal breaks, which prevents further fluid flow into the subretinal space until the retinopexy (photocoagulation or cryopexy) provides a permanent seal (Vaziri et al 2016, Clin. Ophtamol.)

[0788] Accordingly, tamponade agents prevent fluid flow through the retinal break into the subretinal space by filling up the vitreous space. Commonly used tamponade agents include various gases and silicone oils. Different tamponade agents have unique benefits and risks, and choice of the agent should be individualized according to the characteristics of the patient as well as perioperative and postoperative factors.

[0789] Accordingly, tamponade agents which are slowly injected into the eye will make room for following ocular administration of cells (e.g PVR cells), the pharmaceutical composition or the nucleic acid (e.g. an RNA encoding a RUNX inhibitor).

[0790] In preferred embodiments, the ocular administration of the pharmaceutical composition or the nucleic acid (e.g. an RNA encoding a RUNX inhibitor) is performed into a silicone-filled human eye.

[0791] The final step in vitreous surgery is to decide whether it is necessary to fill the vitreous space by using a tamponade agent. Silicone oil (SO, polydimethylsiloxane) has proven itself to be an effective (long-term) tamponade agent as vitreous fluid substitute, especially in the management of complex retinal detachments associated with proliferative vitreoretinopathy. This clear viscous liquid, which is immiscible with water, replaces the vitreous. Its surface tension and mild buoyant force mechanically hold the retina against the choroid (Foster et al 2008, Expert. Rev Optalmol).

[0792] In preferred embodiments, the ocular administration of the pharmaceutical composition or the nucleic acid (e.g. an RNA encoding a RUNX inhibitor) is performed into a gas-filled human eye.

[0793] Gas is a vitreous substitute that serves to keep the retinal surface dry until it heals properly. There are two main types of gases utilized for vitreoretinal surgery: Sulfur hexafluoride (SF6) or Octa (per) fluoro (n-) propane (C3F8).

[0794] Furthermore, hexafluoroethane (C2F6) or (n-) perfluoropropane (C3F8) may be used as well. They can also be mixed with sterile air and the gas bubble is then gradually absorbed over a period of weeks and the eye returns to a fluid-filled state (Lim et al 2014, Case Rep Emerg Med).

[0795] In some embodiments, the ocular administration of the pharmaceutical composition or the nucleic acid (e.g. an RNA encoding a RUNX inhibitor) is performed simultaneously or after gas or silicone extraction.

[0796] In some preferred embodiments, the ocular administration of the pharmaceutical composition or the nucleic acid (e.g. an RNA encoding a RUNX inhibitor) is performed into a C3F8-perfluoropropane-filled human eye or a human eye which was filled prior ocular administration with C3F8-perfluoropropane.

### 3: A Kit or Kit of Parts:

[0797] In a third aspect, the invention provides a kit or kit of parts comprising at least one nucleic acid of the first aspect or at least one pharmaceutical composition of the second aspect, e.g., for use in a method described herein.

[0798] Notably, embodiments relating to the artificial nucleic acid of the first aspect may likewise be read on and be understood as suitable embodiments of the kit or kit of parts of the third aspect. Also, embodiments relating to the pharmaceutical composition of the second aspect may likewise be read on and be understood as suitable embodiments of the kit or kit of parts of the third aspect.

[0799] In preferred embodiments, the kit or kit of parts comprises at least one nucleic acid of the first aspect, preferably at least one RNA, and/or at least one pharmaceutical composition of the second aspect.

[0800] In addition, the kit or kit of parts may comprise a liquid vehicle for solubilising, and/or technical instructions providing information on administration and dosage of the components.

[0801] The kit may further comprise additional components as described in the context of the pharmaceutical composition of the second aspect, and/or the vaccine of the third aspect.

[0802] The technical instructions of said kit may contain information about administration and dosage and patient groups. Such kits, preferably kits of parts, may be applied e.g. for any of the applications or uses mentioned herein, preferably for the use of the nucleic acid of the first aspect or the pharmaceutical composition of the second aspect for the treatment or prophylaxis of diseases, disorder, or condition.

[0803] In some embodiments, the nucleic acid or the pharmaceutical composition is lyophilised or spray (freeze) dried.

[0804] In embodiments where the nucleic acid or the pharmaceutical composition is provided as a lyophilized or spray-freeze dried or spray dried composition, the kit or kit of parts may suitably comprise a buffer for re-constitution of lyophilized or spray-freeze dried or spray dried nucleic acid or composition.

[0805] Accordingly, the kit or kit of parts may additionally comprise a buffer for re-constitution and/or dilution of the nucleic acid or the pharmaceutical composition.

[0806] In preferred embodiments, the buffer for re-constitution and/or dilution is a sterile buffer. In preferred embodiments, the buffer comprises a salt, preferably NaCl, optionally in a concentration of about 0.9%. Such a buffer may optionally comprise an antimicrobial preservative.

[0807] In preferred embodiments, the kit or kit of parts as defined herein comprises at least one syringe or application device. Suitably, a syringe or application device for ocular delivery (e.g. intravitreal delivery).

### 4: Medical Uses:

[0808] In a further aspect, the present invention relates to the medical use of the nucleic acid encoding at least one transcription factor inhibitor as defined herein, the pharmaceutical composition comprising at least one artificial nucleic acid as defined herein, or the kit or kit of parts as defined herein.

[0809] Notably, embodiments relating to the previous aspects may likewise be read on and be understood as suitable embodiments of medical uses of the invention. In addition, embodiments relating to medical uses as described herein of course also relate to methods of treatments.

[0810] Accordingly, the invention provides an artificial nucleic acid of the first aspect, or a pharmaceutical composition of the second aspect, or a kit or kit of the third aspect, for use as a medicament in treating or preventing a disease, disorder, or condition in a subject.

[0811] Suitably, the provided at least one transcription factor inhibitor as defined herein, preferably at least one RUNX inhibitor as defined herein, more preferably at least one RUNX trap (CBFbeta-SMMHC) as defined herein.

[0812] Accordingly, in particularly preferred embodiments, the invention provides an artificial nucleic acid encoding a RUNX inhibitor or a pharmaceutical composition comprising an artificial nucleic acid encoding a RUNX inhibitor, wherein the RUNX inhibitor comprises at least one amino acid sequence element A selected or derived from CBFbeta and at least one amino acid sequence element B selected or derived from SMMHC, for use in treating or preventing a disease, disorder, or condition in a subject. Preferably, the RUNX inhibitor comprises or consists of an amino acid sequence being identical or at least 90%, 91%, 92%, 93%, 94%, 95%, 96%, 97%, 98%, or 99% identical to SEQ ID NO: 232, or a fragment or variant thereof. More preferably, the at least one coding sequence encoding the RUNX inhibitor comprises or consists of a nucleic acid sequence that is identical or at least 90%, 91%, 92%, 93%, 94%, 95%, 96%, 97%, 98%, or 99% identical to any one of the nucleic acid sequences SEQ ID NOs: 418 or 480, or a fragment or a variant of any of these. Even more preferably, the nucleic acid, preferably the mRNA encoding the RUNX inhibitor comprises or consists of a nucleic acid sequence which is identical or at least 90%, 91%, 92%, 93%, 94%, 95%, 96%, 97%, 98%, or 99% identical to a nucleic acid sequence SEQ ID NOs: 1579 or 1580, or a fragment or variant of that sequence. Suitably, the artificial nucleic of the pharmaceutical composition is an mRNA encapsulated in a lipid-based carrier as defined herein, preferably LNPs.

[0813] In preferred embodiments, the use may be for human medical purposes and also for veterinary medical purposes, preferably for human medical purposes.

[0814] In other preferred embodiments, the use may be for human medical purposes, in particular for young infants, newborns, immunocompromised recipients, pregnant and breast-feeding women, and elderly people.

[0815] In various embodiments, the nucleic acid, the pharmaceutical composition, or the kit or kit of parts is administered by intramuscular, intranasal, transdermal, intradermal, intralesional, intracranial, subcutaneous, intracardial, intratumoral, intravenous, intrapulmonal, intraarticular, sublingual, pulmonary, intrathecal, or ocular administration.

[0816] In a further aspect, the present invention provides an artificial nucleic acid of the first aspect, or a pharmaceutical composition of the second aspect, or a kit or kit of parts of the third aspect, for use as a medicament in treating or preventing an ocular disease, disorder, or condition in a subject.

[0817] In preferred embodiments, the disease, disorder, or condition is associated with or caused by an overexpressed and/or an overactive target transcription factor (including aging).

[0818] Suitable target transcription factors may be selected from list A, more preferably from AP1; ATF6; ERG; ETV1; GLI3; HOXA9; MBD2; MEF2A; NF-kappaB; POU3F2 (BRN2); PRDM13; RBPJ; RUNX1; RUNX2; SMAD3; SMAD4; SNAI1; TAZ; TCF21; TWIST1; MAML1; MAML2; EF2A; or YAP, even more preferably from GLI3; HOXA9; MBD2; MEF2A; POU3F2 (BRN2); PRDM13; RUNX1; SMAD3; SMAD4; or SNAI1.

Particularly Preferred is RUNX, e.g. RUNX1.

[0819] In preferred embodiments, the disease, disorder, or condition is associated with or caused by pathological epithelial to mesenchymal transition (EMT), pathological cell proliferation, aberrant angiogenesis, aberrant neovascularization, degeneration, solid tumors, and/or fibrosis.

[0820] As shown in the example section for a RUNX inhibitor, administration of an artificial nucleic acid encoding CBFB-SMMHC leads to a reduction of the cellular expression of EMT-associated genes including TGFbeta2, SMAD3, and/or COL1A1. As exemplified herein for a RUNX inhibitor, administration of an artificial nucleic acid encoding CBFB-SMMHC leads to a reduction of the EMT markers and pathological cell proliferation. Additionally, treatment with artificial nucleic acid encoding the RUNX inhibitor also reversed EMT. This was illustrated by an increase of the epithelial cell clusters at the expense of mesenchymal cell clusters and by an increase in the transcription rate of MARVELD2, a tight junction associated epithelial marker, as a predictor of the future state of the cell.

[0821] Accordingly, in preferred embodiments, the present invention provides an artificial nucleic acid of the first aspect, or a pharmaceutical composition of the second aspect, or a kit or kit of parts of the third aspect, for use as a medicament in treating or preventing a disease, disorder, or condition is associated with or caused by pathological epithelial to mesenchymal transition (EMT).

[0822] Examples of EMT-associated diseases include pathologic ocular fibrosis and proliferation, for example PVR, conjunctival fibrosis (e.g. ocular cicatricial pemphigoid), corneal scarring, corneal epithelial down growth, and/or aberrant fibrosis, diseases in the anterior segment of the eye (e.g., corneal opacification and glaucoma), corneal dystrophies, herpetic keratitis, inflammation (e.g., pterygium), macula edema, retinal and vitreous hemorrhage, fibrovascular scarring, neovascular glaucoma, age-related macular degeneration (ARMD), geographic atrophy, diabetic retinopathy (DR), retinopathy of prematurity (ROP), subretinal fibrosis, epiretinal fibrosis, and gliosis. Other conditions associated with EMT including cancer, e.g., mesothelioma, ocular chronic graft-versus-host disease, corneal scarring, corneal epithelial downgrowth, conjunctival scarring, eye tumors such as melanoma and metastatic tumors, or fibrosis.

[0823] In other preferred embodiments, the present invention provides an artificial nucleic acid of the first aspect, or a pharmaceutical composition of the second aspect, or a kit or kit of parts of the third aspect, for use as a medicament in treating or preventing a disease, disorder, or condition is associated with or caused by aberrant angiogenesis.

[0824] Aberrant angiogenesis is observed in numerous diseases, such as proliferative diabetic retinopathy, ROP, DR,

[0825] AMD, retinal vein occlusions, ocular ischemic syndrome, neovascular glaucoma, retinal hemangiomas, and cancer (especially in solid tumors) and cerebral small vessel disease. It is also observed in genetic diseases such as Coats disease, Nome's Disease, FEVR and Von Hippel Lindau. Aberrant angiogenesis includes any angiogenesis that is not a normal (nonpathological) part of an organism's development, growth, or healing. Ocular neovascularization includes retinal neovascularization as well as neovascularization in the anterior segment of the eye.

[0826] In some instances, aberrant angiogenesis may manifest itself as anterior ocular neovascularization, e.g., aberrant angiogenesis that occurs as a part of corneal graft rejection. Corneal angiogenesis is involved in corneal graft rejection.

[0827] Any disease, disorder, or condition associated with or caused by pathological epithelial to mesenchymal transition (EMT), pathological cell proliferation, aberrant angiogenesis, aberrant neovascularization, and/or fibrosis (e.g. lung fibrosis, and fibrosis in virus infections, e.g. COVID-19) may be inhibited, treated, or prevented using methods and compositions disclosed herein, e.g. using the artificial nucleic acid or composition encoding a transcription factor inhibitor (e.g. a RUNX inhibitor as defined herein).

[0828] Metabolic conditions that trigger RUNX1 hyperactivation such as diabetes (e.g. high blood sugar) or genetic conditions leading to RUNX1 overexpression such as Down syndrome may be inhibited, treated or prevented using methods and compositions disclosed herein, e.g. using the artificial nucleic acid or composition encoding a transcription (e.g. a RUNX inhibitor as defined herein). RUNX1 is located on chromosome 21.

[0829] In preferred embodiments, the ocular disease, disorder, or condition is associated with or caused by aberrant proliferation or migration of retinal pigment epithelial (RPE) cells in a subject.

[0830] For example, upon retinal detachment or trauma, RPE cells may be misplaced from their anatomical location and induced to undergo EMT under the stimuli of growth factors, inflammatory cytokines, and exposure to vitreous, a collagenous gel that fills the space between the lens and the retina. For example, EMT of retinal pigment epithelial (RPE) cells plays a critical role in the pathobiology of PVR.

[0831] In preferred embodiments, the ocular disease, disorder, or condition is selected from proliferative diabetic retinopathy (PDR), macular edema, non-proliferative diabetic retinopathy, age-related macular degeneration, geographic atrophy, ocular neovascularization, retinopathy of prematurity (ROP), a retinal vein occlusion, ocular ischemic syndrome, neovascular glaucoma, a retinal hemangioma, Coats' disease, FEVR, or Norrie disease, or persistent hyperplastic primary vitreous (PHPV), or epiretinal membrane, small vessel disease, thyroid eye disease, or proliferative vitreoretinopathy (PVR).

[0832] In preferred embodiments, the ocular disease, disorder, or condition is selected from age-related macular degeneration (AMD). Age-related macular degeneration (AMD) is an eye disease that is a leading cause of vision loss in older people in developed countries. The vision loss usually becomes noticeable in a person's sixties or seventies and tends to worsen over time. Age-related macular degeneration mainly affects central vision. The vision loss in this condition results from a gradual deterioration of light-sensing cells in the tissue at the back of the eye that detects light and colour (the retina). Specifically, age-related macular degeneration affects a small area near the center of the retina, called the macula, which is responsible for central vision. Side (peripheral) vision and night vision are generally not affected. There are two major types of age-related macular degeneration, known as the dry form and the wet form. The dry form is much more common, accounting for 85 to 90 percent of all cases of AMD. It is characterized by a build-up of yellowish deposits called drusen beneath the retina and slowly progressive vision loss. The condition typically affects vision in both eyes, although vision loss often occurs in one eye before the other. The wet form of age-related macular degeneration is associated with severe vision loss that can worsen rapidly. This form of the condition is characterized by the growth of abnormal, fragile blood vessels underneath the macula. These vessels leak blood and fluid, which damages the macula and makes central vision appear blurry and distorted. Any symptom, type, or stage of AMD may be inhibited, treated, or prevented using methods and compositions disclosed herein, e.g. using the nucleic acid or composition encoding a transcription factor inhibitor (e.g. a RUNX inhibitor as defined herein).

[0833] In preferred embodiments, the ocular disease, disorder, or condition is selected from diabetic retinopathy. Diabetic retinopathy is a condition that occurs in people who have diabetes. It causes progressive damage to the retina, which is the light-sensitive lining at the back of the eye. Over time, diabetes damages the blood vessels in the retina. Diabetic retinopathy occurs when these tiny blood vessels leak blood and other fluids. This causes the retinal tissue to swell, resulting in cloudy or blurred vision. The condition usually affects both eyes. The longer a person has diabetes, without being properly treated, the more likely they will develop diabetic retinopathy. If left untreated, diabetic retinopathy can cause blindness. Symptoms of diabetic retinopathy include (i) seeing spots or floaters; (ii) blurred vision; (iii) having a dark or empty spot in the center of vision; and (iv) difficulty seeing well at night. Often the early stages of diabetic retinopathy have no visual symptoms. Early detection and treatment can limit the potential for significant vision loss from diabetic retinopathy. PDR is a more advanced form of the disease. At this stage, new fragile blood vessels can begin to grow in the retina and into the vitreous. The new blood vessels may leak blood into the vitreous, clouding vision. Without wishing to be bound by any scientific theory, diabetic retinopathy results from the damage diabetes causes to the small blood vessels located in the retina. These damaged blood vessels can cause vision loss. For example, fluid can leak into the macula, the area of the retina responsible for clear central vision. Although small, the macula is the part of the retina that allows us to see colours and fine detail. The fluid causes the macula to swell, resulting in blurred vision. In an attempt to improve blood circulation in the retina, new blood vessels may form on its surface. These fragile, abnormal blood vessels can leak blood into the back of the eye and block vision. Diabetic retinopathy is classified into two types: (1) Non-proliferative diabetic retinopathy (PDR) is the early stage of the disease in which symptoms will be mild or non-existent. In NPDR, the blood vessels in the retina are weakened. Tiny bulges in the blood vessels, called microaneurysms, may leak fluid into the retina. This leakage may lead to swelling of the macula. (2) PDR is the more advanced form of the disease. At this stage, circulation problems deprive the retina of oxygen. As a result new, fragile blood vessels can begin to grow in the retina and into the vitreous, the gel-like fluid that fills the eye. The new blood vessels may leak blood into the vitreous, clouding vision. Both NPDR and PDR may also result in macular edema. Other complications of PDR include detachment of the retina due to scar tissue formation and the development of neovascular glaucoma. Glaucoma is an eye disease in which there is progressive damage to the optic nerve. In PDR, new blood vessels grow into the area of the eye that drains fluid from the eye. This greatly raises the eye pressure, which damages the optic nerve. If left untreated, PDR can cause severe vision loss and even blindness. Any symptom, type, or stage of diabetic retinopathy may be inhibited, treated, or prevented using methods and compositions disclosed herein, e.g. using the nucleic acid or composition encoding a transcription factor inhibitor (e.g. a RUNX inhibitor).

[0834] In preferred embodiments, the ocular disease, disorder, or condition is selected from retinopathy of prematurity. Retinopathy of prematurity (ROP) is a potentially blinding eye disorder that primarily affects premature infants. The smaller a baby is at birth, the more likely that baby is to develop ROP. This disorder, which usually develops in both eyes, is one of the most common causes of visual loss in childhood and can lead to lifelong vision impairment and blindness. These infants are at a much higher risk for ROP. About 90 percent of all infants with ROP are in the milder category and do not need treatment. However, infants with more severe disease can develop impaired vision or even blindness. About 1, 100-1,500 infants annually develop ROP that is severe enough to require medical treatment. About 400-600 infants each year in the US become legally blind from ROP. ROP occurs when abnormal blood vessels grow and spread throughout the retina, the tissue that lines the back of the eye. These abnormal blood vessels are fragile and can leak, scarring the retina and pulling it out of position. This causes a retinal detachment. Retinal detachment is the main cause of visual impairment and blindness in ROP. Without wishing to be bound by any scientific theory, several complex factors may be responsible for the development of ROP. The eye starts to develop at about 16 weeks of pregnancy, when the blood vessels of the retina begin to form at the optic nerve in the back of the eye. The blood vessels grow gradually toward the edges of the developing retina, supplying oxygen and nutrients. During the last 12 weeks of a pregnancy, the eye develops rapidly. When a baby is born full-term, the retinal blood vessel growth is mostly complete (the retina usually finishes growing a few weeks to a month after birth). If a baby is born prematurely, before these blood vessels have reached the edges of the retina, normal vessel growth may stop. The edges of the retina (the periphery) may not get enough oxygen and nutrients. The periphery of the retina may then send out signals to other areas of the retina for nourishment. As a result, new abnormal vessels begin to grow. These new blood vessels are fragile and weak and can bleed, leading to retinal scarring. When these scars shrink, they pull on the retina, causing it to detach from the back of the eye. Aspects of the present invention relate to inhibiting, preventing, or treating the onset of or the progression of a ROP in a premature infant using a nucleic acid or composition of the invention. Any symptom or stage of ROP may be inhibited, treated, or prevented using methods and compositions disclosed herein, e.g. using the nucleic acid or composition encoding a transcription factor inhibitor (e.g. a RUNX inhibitor).

[0835] In preferred embodiments, the ocular disease, disorder, or condition is selected from retinal vein occlusion. Retinal vein occlusion (RVO) is a blockage of the small veins that carry blood away from the retina. Retinal vein occlusion is most often caused by hardening of the arteries (atherosclerosis) and the formation of a blood clot. Blockage of smaller veins (branch veins or BRVO) in the retina often occurs in places where retinal arteries that have been thickened or hardened by atherosclerosis cross over and place pressure on a retinal vein. Risk factors for retinal vein occlusion include: (i) atherosclerosis; (ii) diabetes; (iii) high blood pressure (hypertension; e.g., a systolic pressure of at least 140 mmHg or a diastolic pressure of at least 90 mmHg); and (iv) other eye conditions, such as glaucoma, macular edema, or vitreous hemorrhage. The risk of these disorders increases with age, therefore retinal vein occlusion most often affects older people. Blockage of retinal veins may cause other eye problems, including: (i) glaucoma (high pressure in the eye), caused by new, abnormal blood vessels growing in the front part of the eye; (ii) neovascularization. RVO can cause the retina to develop new, abnormal blood vessels, a condition called neovascularization. These new vessels may leak blood or fluid into the vitreous, the jelly-like substance that fills the inside of the eye. Small spots or clouds, called floaters, may appear in the field of vision. With severe neovascularization, the retina may detach from the back of the eye.); (iii) macular edema, caused by the leakage of fluid in the retina; and (iv) neovascular glaucoma (New blood vessels in certain parts of the eye can cause pain and a dangerous increase in pressure inside the eye.). Any symptom, type, or stage of retinal vein occlusion may be inhibited, treated, or prevented using methods and compositions disclosed herein, e.g. using the nucleic acid or composition encoding a transcription factor inhibitor (e.g. a RUNX inhibitor as defined herein).

[0836] In preferred embodiments, the ocular disease, disorder, or condition is selected from ocular ischemic syndrome. Ocular ischemic syndrome (OIS) encompasses the ocular signs and symptoms that result from chronic vascular insufficiency. Common anterior segment findings include advanced cataract, anterior segment inflammation, and iris neovascularization. Posterior segment signs include narrowed retinal arteries, dilated but no tortuous retinal veins, midperipheral dot-and-blot retinal haemorrhages, cotton-wool spots, and optic nerve/retinal neovascularization. The presenting symptoms include ocular pain and abrupt or gradual visual loss. Without wishing to be bound by any scientific theory, the most common etiology of OIS is severe unilateral or bilateral atherosclerotic disease of the internal carotid artery or marked stenosis at the bifurcation of the common carotid artery. OIS may also be caused by giant cell arteritis. The decreased vascular perfusion results in tissue hypoxia and increased ocular ischemia, leading to neovascularization. Any symptom, type, or stage of ocular ischemic syndrome may be inhibited, treated, or prevented using methods and compositions disclosed herein, e.g. using the nucleic acid or composition encoding a transcription factor inhibitor (e.g. a RUNX inhibitor as defined herein).

[0837] In preferred embodiments, the ocular disease, disorder, or condition is selected from neovascular glaucoma. Neovascular glaucoma (NVG) is classified as a secondary glaucoma. Numerous secondary ocular and systemic diseases that share one common element, retinal ischemia/hypoxia and subsequent release of an angiogenesis factor, cause NVG. This angiogenesis factor causes new blood vessel growth from pre-existing vascular structure. Depending on the progression of NVG, it can cause glaucoma either through secondary open-angle or secondary closed-angle mechanisms. This is accomplished through the growth of a fibrovascular membrane over the trabecular meshwork in the anterior chamber angle, resulting in obstruction of the meshwork and/or associated peripheral anterior synechiae. NVG is a potentially devastating glaucoma, where delayed diagnosis or poor management can result in complete loss of vision or, quite possibly, loss of the globe itself. In managing NVG, it is essential to treat both the elevated intraocular pressure (IOP) and the underlying cause of the disease. Retinal ischemia is the most common and important mechanism in most, if not all, cases that result in the anterior segment changes causing NVG. Various predisposing conditions cause retinal hypoxia and, consequently, production of an angiogenesis factor. Once released, the angiogenic factor(s) diffuses into the aqueous and the anterior segment and interacts with vascular structures in areas where the greatest aqueous-tissue contact occurs. The resultant growth of new vessels at the pupillary border and iris surface [neovascularization of the iris (NVI)] and over the iris angle [neovascularization of the angle (NVA)] ultimately leads to formation of fibrovascular membranes. The fibrovascular membranes, which may be invisible on gonioscopy, accompany NVA and progressively obstruct the trabecular meshwork. This causes secondary open-angle glaucoma. As the disease process continues, the fibrovascular membranes along the NVA tend to mature and contract, thereby tenting the iris toward the trabecular meshwork and resulting in peripheral anterior synechiae and progressive synechial angle closure. Elevated IOP is a direct result of this secondary angle-closure glaucoma. Any symptom, type, or stage of neovascular glaucoma may be inhibited, treated, or prevented using methods and compositions disclosed herein, e.g. using the nucleic acid or composition encoding a transcription factor inhibitor (e.g. a RUNX inhibitor as defined herein).

[0838] In preferred embodiments, the ocular disease, disorder, or condition is selected from retinal hemangiomas. Retinal hemangiomas, also known as retinal capillary hemangiomas (RCHs) and retinal hemangioblastomas, occur most frequently in conjunction with von Hippel-Lindau (VHL) syndrome. These lesions are characterized by plump, but otherwise normal, retinal capillary endothelial cells with normal pericytes and basement membrane. Astrocytes with lipid vacuoles are found in the tumor interstitia. Isolated RCH outside of VHL do occur, although they are more likely to be single, unilateral, and present later. Von Hippel-Lindau syndrome has an autosomal dominant inheritance pattern, with an incidence of 1 in 36,000 live births. These lesions can occur either singly, or more often, multiply and bilaterally, with a greater than 80% predilection for peripheral location. Vision loss can occur from exudation, strabismus, hemorrhage, and retinal detachment, as well secondary causes such as macular edema, lipid maculopathy, and epiretinal membrane. Early lesions often present as indistinct areas of redness in the retina, which appear to be retinal hemorrhages. Patients may be relatively asymptomatic until the lesions achieve larger size, and it is imperative to perform life-long surveillance of even asymptomatic individuals with VHL because smaller lesions are more easily eradicated than larger lesions. Any symptom, type, or stage of retinal hemangioma may be inhibited, treated, or prevented using methods and compositions disclosed herein. In some embodiments, a subject at risk of developing a retinal hemangioma, such as a subject with VHL, is treated to delay or prevent the onset of a retinal hemangioma, e.g. using the nucleic acid or composition encoding a transcription factor inhibitor (e.g. a RUNX inhibitor as defined herein).

[0839] In preferred embodiments, the ocular disease, disorder, or condition is selected from Coats' disease. Coats' disease, (also known as exudative retinitis or retinal telangiectasis, sometimes spelled Coates' disease), is a rare congenital, nonhereditary eye disorder, causing full or partial blindness, characterized by abnormal development of blood vessels behind the retina. Coats' disease results in a gradual loss of vision. Blood leaks from the abnormal vessels into the back of the eye, leaving behind cholesterol deposits and damaging the retina. Coats' disease normally progresses slowly. At advanced stages, retinal detachment is likely to occur. Glaucoma, atrophy, and cataracts can also develop secondary to Coats' disease. In some cases, removal of the eye may be necessary (enucleation). The most common sign at presentation is leukocoria (abnormal white reflection of the retina). Symptoms typically begin as blurred vision, usually pronounced when one eye is closed (due to the unilateral nature of the disease). Often the unaffected eye will compensate for the loss of vision in the other eye; however, this results in some loss of depth perception and parallax. Deterioration of sight may begin in either the central or peripheral vision. Deterioration is likely to begin in the upper part of the vision field as this corresponds with the bottom of the eye where blood usually pools. Flashes of light, known as photopsia, and floaters are common symptoms. Persistent color patterns may also be perceived in the affected eye. Initially, these may be mistaken for psychological hallucinations, but are actually the result of both retinal detachment and foreign fluids mechanically interacting with the photoreceptors located on the retina. One early warning sign of Coats' disease is yellow-eye in flash photography. An eye affected by Coats' will glow yellow in photographs as light reflects off cholesterol deposits. Coats' disease is thought to result from breakdown of the blood-retinal barrier in the endothelial cell, resulting in leakage of blood products containing cholesterol crystals and lipid-laden macrophages into the retina and subretinal space. Over time, the accumulation of this proteinaceous exudate thickens the retina, leading to massive, exudative retinal detachment. On funduscopic eye examination, the retinal vessels in early Coats' disease appear tortuous and dilated, mainly confined to the peripheral and temporal portions of retina. In moderate to severe Coats' disease, massive retinal detachment and hemorrhage from the abnormal vessels may be seen. Any symptom, type, or stage of Coats' disease may be inhibited, treated, or prevented using methods and compositions disclosed herein. In some embodiments, a subject at risk of developing Coats' disease is treated to delay or prevent the onset of Coats' disease, e.g. using the nucleic acid or composition encoding a transcription factor inhibitor (e.g. a RUNX inhibitor as defined herein).

[0840] In preferred embodiments, the ocular disease, disorder, or condition is selected from Norrie disease. Norrie disease is an inherited eye disorder that leads to blindness in male infants at birth or soon after birth. It causes abnormal development of the retina, the layer of sensory cells that detect light and colour, with masses of immature retinal cells accumulating at the back of the eye. As a result, the pupils appear white when light is shone on them, a sign called leukocoria. The irises (colored portions of the eyes) or the entire eyeballs may shrink and deteriorate during the first months of life, and cataracts (cloudiness in the lens of the eye) may eventually develop. About one third of individuals with Norrie disease develop progressive hearing loss, and more than half experience developmental delays in motor skills such as sitting up and walking. Other problems may include mild to moderate intellectual disability, often with psychosis, and abnormalities that can affect circulation, breathing, digestion, excretion, or reproduction. Mutations in the norrin cystine knot growth factor (NDP) gene cause Norrie disease. The NDP gene provides instructions for making a protein called norrin. Mutations in the Norrie gene are often unique to a family and have been described throughout the extent of the Norrie gene. Although Norrie disease itself does not seem to shorten lifespan, individuals with blindness, deafness and/or mental disability may have a reduced lifespan as a result of these conditions. Any symptom, type, or stage of Norrie disease may be inhibited, treated, or prevented using methods and compositions disclosed herein, e.g. using the nucleic acid or composition encoding a transcription factor inhibitor (e.g. a RUNX inhibitor as defined herein).

[0841] In preferred embodiments, the ocular disease, disorder, or condition is selected from familial exudative vitreoretinopathy (FEVR). FEVR is a rare hereditary ocular disorder characterized by a failure of peripheral retinal vascularization which may be abnormal or incomplete. FEVR is a condition with fundus changes similar to those in retinopathy of prematurity but appearing in children who had been born full-term with normal birthweight. With respect to genetics, about 50% of cases can be linked to 4 causative genes (DP, LRP5, FZD4, and TSPAN12), all of which form part of the Wnt signalling pathway, which is vital for normal retinal vascular development. Any symptom, type, or stage of FEVR may be inhibited, treated, or prevented using methods and compositions disclosed herein. In some embodiments, a subject at risk of developing FEVR is treated to delay or prevent the onset or progression of FEVR. In some embodiments, a subject at risk of developing FEVR is treated to delay or prevent the onset or progression of aberrant angiogenesis due to FEVR, e.g. using the nucleic acid or composition encoding a transcription factor inhibitor (e.g. a RUNX inhibitor as defined herein).

[0842] In particularly preferred embodiments, the ocular disease, disorder, or condition is selected from proliferative vitreoretinopathy (PVR). Proliferative vitreoretinopathy (PVR) is a clinical syndrome that develops as a complication of rhegmatogenous retinal detachment and is also commonly associated with eye trauma. PVR is the most common cause of failure in retinal detachment surgery, however, it can also occur with untreated eyes with retinal detachment. In particular, PVR can occur with vitreous hemorrhage, after cryotherapy, after laser retinopexy, pneumatic retinopexy, scleral buckling, or vitrectomy, and after a variety of surgical complications. PVR is also common after eye traumas (e.g., penetrating injuries) and other conditions associated with prolonged inflammation. PVR occurs in about 8-10% of patients undergoing primary retinal detachment surgery and prevents the successful surgical repair of rhegmatogenous retinal detachment. PVR can be treated with surgery to reattach the retina, however, the visual outcome of the surgery is very poor. If PVR is progressive, then despite complex surgery, low vision in the eye results. PVR is characterized by proliferation or migration of cells derived from retinal pigment epithelium (RPE), glia, or inflammatory recruitment on the retinal surface and within the vitreous. These cells transdifferentiate and take on contractile properties. The process of PVR can start when there is an interruption to the surface lining (e.g., through posterior vitreous detachment and local preretinal membrane formation or retinal tears in the periphery). The PVR process is self-propagating and is often considered an inappropriate excess wound-healing response. The cellular proliferation can increase the influx of inflammatory cytokines and inflammatory cells. In embodiments, as described herein proliferation or migration of RPE cells describes their transdifferentiation to assume contractile properties through internal cellular contractile proteins and by laying down extracellular collagen. The cells can multiply and grow along any available scaffolding (e.g., the retinal surfaces or elements of the residual vitreous). The mass contraction can lead to retinal wrinkles, folds, tears, and traction retinal detachment. During rhegmatogenous retinal detachment, fluid from the vitreous humor enters a retinal hole. The accumulation of fluid in the subretinal space and the tractional force of the vitreous on the retina result in rhegmatogenous retinal detachment. During this process the retinal cell layers come in contact with vitreous cytokines. These cytokines trigger the ability of the retinal pigmented epithelium (RPE) to proliferate and migrate. The process involved resembles fibrotic wound healing by the RPE cells. The RPE cells undergo epithelial-mesenchymal transition (EMT) and develop the ability to migrate out into the vitreous. During this process the RPE cell layer-neural retinal adhesion and RPE-ECM (extracellular matrix) adhesions are lost. The RPE cells lay down fibrotic membranes while they migrate and these membranes contract and pull at the retina. Thus, this leads to secondary retinal detachment after primary retinal detachment surgery. During RPE disruption, inflammation may play an important role in the development of PVR. Cytokines IL-6, IL-I, TNFalpha have been identified in high concentrations in the vitreous in the early, proliferative stages of PVR, but they decrease to normal levels in the scarring phase. Other molecules involved in PVR include TGF and IL-6. The transcription factor RUNX1 is involved in the development and progression of PVR.

[0843] Risk factors and clinical signs: As described above, the most common development of PVR is after a retinal detachment surgery and/or repair, although patients can develop PVR spontaneously with retinal detachment prior to surgery or with longstanding primary detachments. Multiple factors have been associated with the formation of PVR. In general, processes that increase vascular permeability are more likely to increase the probability of PVR formation. Specific risk factors that have been identified include: uveitis; large, giant, or multiple tears; vitreous hemorrhage, preoperative or postoperative choroidal detachments; aphakia; multiple previous surgeries; and large detachments involving greater than 2 quadrants of the eye. Early signs of PVR are often subtle and can include cellular dispersion in the vitreous and on the retinal surface, which can appear as a white opacification of the retinal surface and small wrinkles or folds. More developed PVR is characteristic with fixed folds and retinal detachment. Diagnosis is typically done by indirect ophthalmoscopy and slit-lamp biomicroscopy. Additionally, an ultrasound can help visualize immobile retinal folds of detachment and prominent vitreous membranes. Also, wide-field fundus photography can be used to visualize retinal detachments. However, the clinical history and exam is often enough to make the diagnosis of a retinal detachment.

[0844] Development Stages: Ocular wound healing typically occurs in 3 stages: (1) an inflammatory stage, (2) a proliferative stage, and (3) a modulatory stage. PVR can be viewed in a similar fashion, with the wound being the retinal detachment. This healing response often takes place over many weeks. Early on, preretinal PVR adopts an immature appearance and consistency. During this phase, the retina may still remain compliant, and the PVR membrane may be difficult to remove due to its amorphous form. By 6 to 8 weeks, however, the PVR membrane becomes more mature, taking on a white, fibrotic appearance. In this stage, the PVR is more easily identifiable, causes rigidity of the retina, and can be more identifiably removed.

[0845] Classification: The extent of PVR in patients is often classified (or graded) depending on the severity. The most commonly used classification system was published by the Retina Society Terminology Committee. It classifies the appearance of PVR based on clinical signs and its geographic location (Grade A, B, C, or D). Grade A is characterized by the appearance of vitreous haze and RPE cells in the vitreous, or by pigment clumping. Grade B is characterized by wrinkling of the edges of the retinal tear or the inner retinal surface. Grade C is characterized by posterior or anterior full thickness retinal folds with the presence of epi/subretinal membranes/bands. Grade D is characterized by fixed retinal folds in all four quadrants. Diagnosis via clinical examination and imaging for PVR is known in the art, e.g., as described in the classification of retinal detachment with proliferative vitreoretinopathy. Ophthalmology, 1983; 90 (2): p. 121-5. Clinical examination and classification schemes are further described in Di Lauro et ak, J Ophthalmol. 2016; Volume 2016, Article ID 7807596, 6 pages 2016:7807596. (PMCID: PMC4939352); hereby incorporated by reference. PVR is a condition distinct from proliferative diabetic retinopathy (PDR). PVR is a condition distinct from a small blood vessel disease. The fundamental process involved in PDR is aberrant angiogenesis, and therefore impacting vascular endothelial cells. To the contrary, in PVR, the fundamental processes is the aberrant epithelial to mesenchymal transition (EMT) of retinal pigment epithelial derived cells, and other cells within the eye.

[0846] Any symptom, type, or stage of PVR may be inhibited, treated, or prevented using methods and compositions disclosed herein, e.g. using the nucleic acid or composition encoding a transcription factor inhibitor (e.g. a RUNX inhibitor as defined herein).

[0847] In preferred embodiments, the ocular disease, disorder, or condition is epiretinal membrane, a very common disease that occurs after retinal detachment surgery and can be considered a very mild form of PVR, that can cause visual change, due to a very thin membrane forming on top of the retina.

[0848] Accordingly, in particularly preferred embodiments, the ocular disease, disorder, or condition is PVR, preferably the prevention of PVR.

[0849] As shown in the example section, treatment of C-PVR cells (human primary cell cultures obtained from surgically removed PVR membranes) with nucleic acid encoding a RUNX inhibitor (CBFbeta-SMMHC) led to a significant reduction in RUNX1 expression and significant reduction in EMT-associated genes. In addition, treatment of C-PVR cells with nucleic acid encoding a RUNX inhibitor (CBFbeta-SMMHC) strongly reduced proliferation and ocular pathology triggered by injection of human PVR cells in a rabbit eye. Further shown in the Example section, administration of the artificial nucleic acid or composition led to a prevention of EMT in PVR.

[0850] In preferred embodiments in that context, cell proliferation and/or cell growth is reduced in eyes with PVR.

[0851] In preferred embodiments, the invention provides an artificial nucleic acid, or a pharmaceutical composition, or a kit or kit of parts, for use as a medicament in treating or preventing a disease, disorder, or condition in a subject, wherein the subject has suffered a trauma to the eye, comprises a retinal hole, a retinal tear, a retinal detachment disorder, or has undergone an ocular surgery.

[0852] Retinal detachment disorder is a disorder of the eye in which the neurosensory retina separates from the retinal pigment epithelial layer underneath. The mechanism most commonly involves a break in the retina that then allows the fluid in the eye to get behind the retina. A break in the retina can occur from a posterior vitreous detachment, injury to the eye, or inflammation of the eye. Other risk factors include being short sighted and previous cataract surgery. Typically, diagnosis is accomplished by either looking at the back of the eye with an ophthalmoscope or by ultrasound. Symptoms include an increase in the number of floaters, flashes of light, and worsening of the outer part of the visual field, which may be described as a curtain over part of the field of vision. In about 7% of cases both eyes are affected. Without treatment permanent loss of vision may occur. Retinal detachments affect between 0.6 and 1.8 people per 10,000 per year. About 0.3% of people are affected at some point in their life. It is most common in people who are in their 60s or 70s, and males are more often affected than females. The long term outcomes depend on the duration of the detachment and whether the macula was detached. If treated before the macula detaches outcomes are generally good. Optionally, the subject has not been diagnosed or characterized with some other ocular disorder comprising age-related macular degeneration or an ocular angiogenesis disease or disorder. When the retina is pulled away from the back of the eye, it is a retinal detachment. Typically, the vitreous moves away from the retina without causing problems. But sometimes the vitreous pulls hard enough to tear the retina in one or more places, and thus causing a retinal tear. Fluid may pass through a retinal tear, lifting the retina off the back of the eye.

[0853] The symptoms of vitreous separation, retinal tear, and retinal detachment are similar and sometimes can overlap. On occasion, the patient may notice the floaters and flashing lights (photopsia) more commonly associated with isolated vitreous separation. An ophthalmologist, optometrist, or primary care physician may be suspicious about a more serious problem if symptoms are of very recent or sudden onset and are accompanied by a shower of spots or “cobwebs”. Of even greater concern is the loss of peripheral vision, which may present as a shadow moving toward the center of one's field of vision. Additionally, in retinal detachment, a retinal hole may develop. Because the vitreous is attached to the retina with tiny strands of collagen, it can pull on the retina as it shrinks. Sometimes, this shrinkage can tear off a small piece of the retina in the periphery, causing a hole or tear of the periphery retina. If this missing piece of retina is in the macula, it is called a macular hole. Additionally, another direct cause of macular holes due to vitreous shrinkage is when the collagen strands stay attached to the retina forming an epiretinal membrane. These membranes can contract around the macula, causing the macula to develop a hole from the traction. Retinal detachments commonly occur secondary to peripheral retinal tears/holes, and rarely form macular holes. A minority of retinal detachments result from trauma, including blunt blows to the orbit, penetrating trauma, and concussions to the head. There are three types of retinal detachment: (1) rhegmatogenous retinal detachment-a rhegmatogenous retinal detachment occurs due to a break in the retina (e.g., a retinal tear) that allows fluid to pass from the vitreous space into the subretinal space between the sensory retina and the retinal pigment epithelium. Retinal breaks are divided into three types-holes, tears and dialyses. Holes form due to retinal atrophy especially within an area of lattice degeneration. Tears are due to vitreoretinal traction. Dialyses are very peripheral and circumferential and may be either tractional or atrophic. The atrophic form most often occurs as idiopathic dialysis of the young. (2) Exudative, serous, or secondary retinal detachment—an exudative retinal detachment occurs due to inflammation, injury or vascular abnormalities that results in fluid accumulating underneath the retina without the presence of a hole, tear, or break. In evaluation of retinal detachment, it is critical to exclude exudative detachment as surgery will make the situation worse, not better. Although rare, exudative detachment can be caused by the growth of a tumor on the layers of tissue beneath the retina, namely the choroid. This cancer is called a choroidal melanoma. (3) Tractional retinal detachment-a tractional retinal detachment occurs when fibrous (from PVR membrane) or fibrovascular (from neovascular disorders such as proliferative diabetic retinopathy) tissue, caused by an injury, inflammation or neovascularization, pulls the sensory retina from the retinal pigment epithelium

[0854] Accordingly, in preferred embodiments, the retinal detachment disorder is selected from rhegmatogenous retinal detachment, exudative retinal detachment, or tractional retinal detachment.

[0855] In preferred embodiments, the nucleic acid, the pharmaceutical composition, or the kit or kit of parts is administered by local administration, preferably by ocular administration.

[0856] In some embodiments, the artificial nucleic acid or composition of the invention may be administered using an ocular delivery device. The ocular delivery device may be designed for the controlled release of the artificial nucleic acid or the pharmaceutical composition with multiple defined release rates and sustained dose kinetics and permeability.

[0857] In preferred embodiments, the ocular administration is selected from intravitreal administration, by administration prior to an ocular surgery, during an ocular surgery, or after an ocular surgery.

[0858] In particularly preferred embodiments, the ocular administration is selected from intravitreal administration.

[0859] In particularly preferred embodiments in that context, at least one ocular administration is prior to an ocular surgery, during an ocular surgery, and/or after an ocular surgery. Some disease, disorders or conditions in the eye occur after an ocular surgery or operation as described herein (e.g. PVR). Accordingly, administration of the pharmaceutical composition or nucleic acid (e.g. an RNA encoding a RUNX inhibitor) via intraoperative administration is preferred in medical applications where a transcription factor is to be inhibited in the eye, for example RUNX, that is associated with a disease, disorders or condition that occurs after an ocular surgery or operation.

[0860] In some embodiments, a first dose of the nucleic acid or composition is administered during an ocular surgery, and second and further doses are administered via intravitreal administration. For example, a nucleic acid encoding a RUNX inhibitor of the invention may be administered at the time of diagnosis of a retinal detachment, or during an ocular surgery (e.g. to prevent the development of a disease, e.g. PVR) and a second and optional further doses are administered via intravitreal administration (e.g. to prevent the development of a disease, e.g. PVR).

[0861] In particularly preferred embodiments, the disease, disorder, or condition is associated with or caused by overexpressed and/or overactive RUNX transcription factor. Preferred in that context is RUNX1. Suitably, the disease, disorder, or condition is associated with or caused by overexpressed and/or overactive RUNX transcription factor is an ocular disease.

[0862] RUNX1 has non-detectable basal expression in the healthy retina, whereas in pathologies such as proliferative diabetic retinopathy and choroidal neovascularization, aberrant RUNX1 signalling occurs and is believed to drive the angiogenic process. These data indicate that use of the nucleic acid encoding a RUNX inhibitor may be applicable in a very broad range of pathologies characterized by increased RUNX1 transcription factor activity. RUNX1 functions as a transcriptional switch allowing organisms to control for delicate cell fate decisions in multiple critical developmental processes including hematopoiesis. In addition, our group uncovered multiple instances where RUNX1 expression, which is normally silent, is strongly induced to drive control pathological processes associated with aberrant angiogenesis, EMT, and fibrosis in the eye and elsewhere. These processes are fundamental to prevalent conditions including cancer, proliferative diabetic retinopathy, exudative age-related macular degeneration, proliferative vitreoretinopathy, lung fibrosis, and virus-caused lung fibrosis e.g. COVID-19.

[0863] For example, essentially all ocular diseases characterized by aberrant angiogenesis or pathologic epithelial-mesenchymal transition (EMT) are associated with RUNX1 overexpression. Examples of diseases that involve aberrant angiogenesis that are associated with RUNX1 overexpression include non-proliferative diabetic retinopathy, diabetic macular edema, exudative age-related macular degeneration, retinal neovascularization, iris neovascularization, neovascular glaucoma, central retinal vein occlusion, branch retinal vein occlusion, Coats' disease, familial exudative vitreoretinopathy (FEVR), Von Hippel Lindau disease, retinal hemangioma, Leber's military aneurysms, macula telangiectasia, polypoidal choroidal vasculopathy, myopic choroidal neovascularization, idiopathic choroidal neovascularization, corneal neovascularization, thyroid eye disease, small vessel disease. Examples of diseases that involve aberrant EMT that are associated with RUNX1 overexpression include Proliferative vitreoretinopathy (PVR), open angle glaucoma, exudative age-related macular degeneration (fibrosis of CNV lesions), uveal metastatic cancers, geographic atrophy. Further, examples of diseases that may be associated with RUNX1 overexpression include primary ocular tumors including uveal melanoma, retinoblastoma, astrocytomas. Additional diseases that may be associated with RUNX1 overexpression include corneal scarring after trauma, infection, chemical injury, cataracts, epiretinal membranes, corneal neovascularization, corneal scarring, which has implications for corneal transplants and corneal chemical injury/trauma, corneal viral infections, ocular cancers, uveal melanomas.

[0864] In various embodiments of the invention, the artificial nucleic acid or composition of the invention may be administered only once or multiple times. For example, a nucleic acid encoded RUNX inhibitor may be administered using a method disclosed herein at least about once, twice, three times, four times, five times, six times, or seven times per day, week, month, or year. In some embodiments, a nucleic acid encoded RUNX inhibitor is administered once per month. In certain embodiments, a nucleic acid encoded RUNX inhibitor is administered once per week, once every two weeks, once a month via intravitreal injection. In various embodiments, such as embodiments involving eye drops, a composition is self-administered.

[0865] In particularly preferred embodiment, the invention provides an artificial nucleic acid encoding a RUNX inhibitor or a pharmaceutical composition comprising an artificial nucleic acid encoding a RUNX inhibitor, wherein the RUNX inhibitor comprises at least one amino acid sequence element A selected or derived from CBFbeta and at least one amino acid sequence element B selected or derived from SMMHC, for use in treating or preventing an ocular disease, disorder, or condition associated with or caused by overexpressed and/or overactive RUNX transcription factor, preferably proliferative vitreoretinopathy (PVR), preferably wherein the artificial nucleic acid or the pharmaceutical composition is to be administered via ocular administration. Preferably, the RUNX inhibitor comprises or consists of an amino acid sequence being identical or at least 90%, 91%, 92%, 93%, 94%, 95%, 96%, 97%, 98%, or 99% identical to SEQ ID NO: 232, or a fragment or variant thereof. More preferably, the at least one coding sequence encoding the RUNX inhibitor comprises or consists of a nucleic acid sequence that is identical or at least 90%, 91%, 92%, 93%, 94%, 95%, 96%, 97%, 98%, or 99% identical to any one of the nucleic acid sequences SEQ ID NOs: 418 or 480, or a fragment or a variant of any of these. Even more preferably, the nucleic acid, preferably the mRNA encoding the RUNX inhibitor comprises or consists of a nucleic acid sequence which is identical or at least 90%, 91%, 92%, 93%, 94%, 95%, 96%, 97%, 98%, or 99% identical to a nucleic acid sequence SEQ ID NOs: 1579 or 1580, or a fragment or variant of that sequence. Suitably, the artificial nucleic of the pharmaceutical composition is an mRNA encapsulated in lipid-based carriers, preferably LNPs.

[0866] A further aspect of the invention relates to a pharmaceutical composition comprising at least one RNA encoding a therapeutic protein formulated in a lipid nanoparticle (LNP), wherein the LNP comprise an aggregation reducing lipid, a cationic lipid selected or derived from formula (III-1), a neutral lipid or phospholipid and a steroid or steroid analog, for use in treatment or prevention of an ophthalmic disease, disorder or condition, wherein said composition is administered via intravitreal administration to a subject in need thereof.

[0867] Surprisingly in that context, LNPs having cationic lipids as defined herein, in particular cationic lipids selected or derived from formula (III-1) are suitable for ocular delivery.

[0868] Accordingly, the at least one cationic or ionizable lipid is a lipid selected or derived from formula (III-1)

[chemical structure]

[0869] preferably, wherein one of L1 or L2 is —O(C═O)—, —(C═O)O—, —C(═O)—, —O—, —S(O)x-, —S—S—, —C(═O)S—, SC(═O)—, —NRaC(═O)—, —C(═O)NRa—, —NRaC(═O)NRa—, —OC(═O)NRa— or —NRaC(═O)O—, and the other of L1 or L2 is —O(C═O)—, —(C═O)O—, —C(═O)—, —O—, —S(O)x-, —S S—, —C(═O)S—, SC(═O)—, —NRaC(═O)—, —C(═O)NRa—, —NRaC(═O)NRa—, —OC(═O)NRa— or —NRaC(═O)O— or a direct bond; G1 and G2 are each independently unsubstituted C1-C12 alkylene or C1-C12 alkenylene; G3 is C1-C24 alkylene, C1-C24 alkenylene, C3-C8 cycloalkylene, C3-C8 cycloalkenylene; Ra is H or C1-C12 alkyl; R1 and R2 are each independently C6-C24 alkyl or C6-C24 alkenyl; R3 is H, OR5, CN, C(═O)OR4, OC(═O)R4 or —NR5C(═O)R4; R4 is C1-C12 alkyl; R5 is H or C1-C6 alkyl; and x is 0, 1 or 2.

[0870] Preferably, the at least one cationic or ionizable lipid is selected or derived from a lipid according to formula III-3:

[chemical structure]

[0871] Most preferably, the cationic lipid is selected or derived from ALC-0315, SM-102.

[0872] Suitably, the LNPs comprise at least one aggregation-reducing lipid, at least one cationic lipid or ionizable lipid, at least one neutral lipid or phospholipid, and at least one steroid or steroid analog.

[0873] The aggregation reducing lipid is selected from a polymer conjugated lipid, for example a PEG-conjugated lipid or a PEG-free lipid.

[0874] The polymer conjugated lipid is selected or derived from DMG-PEG 2000, C10-PEG2K, Cer8-PEG2K, POZ-lipid, or ALC-0159. Alternatively, the polymer conjugated lipid is a POZ-lipid as defined herein.

[0875] Suitably, the neutral lipid is selected or derived from DSPC, DHPC, or DphyPE.

[0876] Suitably, the steroid or steroid analog selected or derived from cholesterol, cholesteryl hemisuccinate (CHEMS), preferably cholesterol.

[0877] Accordingly, in that context, the LNPs encapsulating the mRNA comprise
[0878] (i) at least one cationic lipid selected from ALC-0315;
[0879] (ii) at least one neutral lipid selected from DSPC;
[0880] (iii) at least one steroid or steroid analogue selected from cholesterol; and
[0881] (iv) at least one aggregation reducing lipid selected from ALC-0159. Suitably, the LNPs in that context are 315 LNPs as defined herein.

[0882] Alternatively, in that context, the LNPs encapsulating the mRNA comprise
[0883] (i) at least one cationic lipid selected from SM-102;
[0884] (ii) at least one neutral lipid selected from DSPC;
[0885] (iii) at least one steroid or steroid analogue selected from cholesterol; and
[0886] (iv) at least one aggregation reducing lipid selected from DMG-PEG 2000. Suitably, the LNPs in that context are SM-102 LNPs as defined herein.

[0887] In preferred embodiments, the LNPs comprise about 20-60% cationic lipid, about 5-25% neutral lipid, about 25-55% steroid or steroid analogue, and about 0.5-15% aggregation reducing lipid.

[0888] In preferred embodiments, the wt/wt ratio of lipid to RNA in the LNPs is from about 10:1 to about 60:1, preferably from about 20:1 to about 30:1. Suitably, the N/P ratio of the lipid-based carriers encapsulating the mRNA is in a range from about 1 to about 10, preferably in a range from about 5 to about 7.

[0889] Preferably, the LNPs have a Z-average size in a range of about 50 nm to about 120 nm.

[0890] In a preferred embodiment, intravitreal administration to a subject in need thereof is performed into a tamponade agent-filled human eye (e.g. gas agent or a silicone agent)

[0891] In a preferred embodiment, the ophthalmic disease, disorder or condition may be selected from PVR, neovascularization, retinal degenerative disease, diabetic eye disease, retinal detachment, optic nerve disease, endocrine disorders, cancer disease, infectious disease, parasitic disease, in particular, pigmentary uveitis (PU), branch retinal vein occlusion (BRVO), central retinal vein occlusion (CRVO), macular edema, cystoid macular edema (CME), uveitic macular edema (UME), cytomegalovirus retinitis, endophthalmitis, scleritis, choriotetinitis, dry eye syndrome, Norris disease, Coat's disease, persistent hyperplastic primary vitreous, familial exudative vitreoretinopathy, Leber congenital amaurosis, X-linked retinoschisis, Leber's hereditary optic neurophathy, uveitis, refraction and accommodation disorders, keratoconus, amblyopia, conjunctivitis, comeal ulcers, dacryocystitis, Duane retraction syndrome, optic neuritis, ocular inflammation, glaucoma, macular degeneration, and uveitis, or any disease, disorder or condition related or associated thereto.

[0892] In a preferred embodiment, the mRNA provides a coding sequence encoding a therapeutic protein. Suitably, the therapeutic protein is selected from an antibody, an antibody fragment, an intrabody, a receptor, a binding protein, a CRISPR-associated endonuclease, a transcription factor, an enzyme, a growth factor, a structural protein, cytoplasmic or cytoskeletal proteins, or fragments, variants, or combinations of any of these.

### 5: Methods of Treatment:

[0893] In a further aspect, the present invention relates to a method of treating or preventing a disease, disorder or condition.

[0894] Notably, embodiments relating to the previous aspects may likewise be read on and be understood as suitable embodiments of method of treatments of the invention. In particular, specific features and embodiments relating to method of treatments as provided herein may also apply for medical uses of the invention and vice versa.

[0895] Preventing (inhibiting) or treating a disease relates to inhibiting the full development of a disease or condition, for example, in a subject who is at risk for a disease such as an infection. “Treatment” refers to a therapeutic intervention that ameliorates a sign or symptom of a disease or pathological condition after it has begun to develop. The term “ameliorating”, with reference to a disease or pathological condition, refers to any observable beneficial effect of the treatment. Inhibiting a disease can include preventing or reducing the risk of the disease. The beneficial effect can be evidenced, for example, by a delayed onset of clinical symptoms of the disease in a susceptible subject, a reduction in severity of some or all clinical symptoms of the disease, a slower progression of the disease, an improvement in the overall health or well-being of the subject, or by other parameters that are specific to the particular disease. A “prophylactic” treatment is a treatment administered to a subject who does not exhibit signs of a disease or exhibits only early signs for the purpose of decreasing the risk of developing pathology.

[0896] In preferred embodiments, the present invention relates to a method of treating or preventing a disease, disorder or condition, wherein the method comprises applying or administering to a subject in need thereof an effective amount of the artificial nucleic acid of the first aspect, or the pharmaceutical composition of the second aspect, or the kit or kit of parts of the third aspect.

[0897] As used herein, “effective” when referring to an amount of a therapeutic compound refers to the quantity of the compound that is sufficient to yield a desired therapeutic response without undue adverse side effects (such as toxicity, irritation, or allergic response) commensurate with a reasonable benefit/risk ratio when used in the manner of this disclosure.

[0898] Accordingly, in particularly preferred embodiments, the method of treating or preventing a disease, disorder or condition provides an artificial nucleic acid encoding a RUNX inhibitor or a pharmaceutical composition comprising an artificial nucleic acid encoding a RUNX inhibitor, wherein the RUNX inhibitor comprises at least one amino acid sequence element A selected or derived from CBFbeta and at least one amino acid sequence element B selected or derived from SMMHC, for use in treating or preventing a disease, disorder, or condition in a subject. Preferably, the RUNX inhibitor comprises or consists of an amino acid sequence being identical or at least 90%, 91%, 92%, 93%, 94%, 95%, 96%, 97%, 98%, or 99% identical to SEQ ID NO: 232, or a fragment or variant thereof. More preferably, the at least one coding sequence encoding the RUNX inhibitor comprises or consists of a nucleic acid sequence that is identical or at least 90%, 91%, 92%, 93%, 94%, 95%, 96%, 97%, 98%, or 99% identical to any one of the nucleic acid sequences SEQ ID NOs: 418 or 480, or a fragment or a variant of any of these. Even more preferably, the nucleic acid, preferably the mRNA encoding the RUNX inhibitor comprises or consists of a nucleic acid sequence which is identical or at least 90%, 91%, 92%, 93%, 94%, 95%, 96%, 97%, 98%, or 99% identical to a nucleic acid sequence SEQ ID NOs: 1579 or 1580, or a fragment or variant of that sequence. Suitably, the artificial nucleic of the pharmaceutical composition is an mRNA encapsulated in lipid-based carriers, preferably LNPs.

[0899] In preferred embodiments, the method is for human medical purposes and also for veterinary medical purposes, preferably for human medical purposes.

[0900] In other preferred embodiments, method is for human medical purposes, in particular for young infants, newborns, immunocompromised recipients, pregnant and breast-feeding women, and elderly people.

[0901] In various embodiments of the method, the nucleic acid, the pharmaceutical composition, or the kit or kit of parts is administered by intramuscular, intranasal, transdermal, intradermal, intralesional, intracranial, subcutaneous, intracardial, intratumoral, intravenous, intrapulmonal, intraarticular, sublingual, pulmonary, intrathecal, or ocular administration.

[0902] In preferred embodiments, the disease, disorder, or condition is an ocular disease, disorder, or condition.

[0903] In preferred embodiments, the disease, disorder, or condition is associated with or caused by an overexpressed and/or an overactive transcription factor (including e.g. aging).

[0904] In preferred embodiments, the disease, disorder, or condition associated with or caused by pathological epithelial to mesenchymal transition (EMT), pathological cell proliferation, aberrant angiogenesis, aberrant neovascularization, degeneration, solid tumors, and/or fibrosis.

[0905] In preferred embodiments, the ocular disease, disorder, or condition is associated with or caused by aberrant proliferation or migration of retinal pigment epithelial (RPE) cells in a subject.

[0906] In preferred embodiments, the ocular disease, disorder, or condition is selected from proliferative diabetic retinopathy (PDR), macular edema, non-proliferative diabetic retinopathy, age-related macular degeneration, geographic atrophy, ocular neovascularization, retinopathy of prematurity (ROP), a retinal vein occlusion, ocular ischemic syndrome, neovascular glaucoma, a retinal hemangioma, Coates' disease, FEVR, or Norrie disease, persistent hyperplastic primary vitreous, epiretinal membrane, small vessel disease, thyroid eye disease, or proliferative vitreoretinopathy (PVR).

[0907] In preferred embodiments, the ocular disease, disorder, or condition is PVR, preferably the prevention of PVR.

[0908] In preferred embodiments, cell proliferation and/or cell growth is reduced in eyes with PVR.

[0909] In preferred embodiments, the subject has suffered a trauma to the eye, comprises a retinal hole, a retinal tear, a retinal detachment disorder, or has undergone an ocular surgery.

[0910] In preferred embodiments, the retinal detachment disorder is selected from rhegmatogenous retinal detachment, exudative retinal detachment, or tractional retinal detachment.

[0911] In preferred embodiments, the applying or administering is performed more than once, for example two times, three times, or four times, for example periodically.

[0912] In preferred embodiments, the applying or administering is performed by local administration, preferably by ocular administration.

[0913] In preferred embodiments, the applying or administering is performed by intravitreal administration, by administration prior to an ocular surgery, during an ocular surgery, and/or after an ocular surgery.

[0914] In preferred embodiments, the disease, disorder, or condition is associated with or caused by overexpressed RUNX and/or overactive RUNX, preferably RUNX1.

[0915] In a preferred aspect, the present invention relates to a method of treating or preventing or preventing an ocular disease in a subject comprising
[0916] a) administering to the subject an effective amount of a composition comprising an artificial nucleic acid comprising at least one coding sequence encoding the RUNX inhibitor, the RUNX inhibitor comprising:
   [0917] at least one amino acid element A selected or derived from CBFbeta configured to bind to the target transcription factor RUNX in the cytosol; and.
   [0918] at least one amino acid element B selected or derived from SMMHC configured to trap the target transcription factor RUNX in the cytosol.

[0919] Suitably, the RUNX inhibitor comprises or consists of an amino acid sequence being identical or at least 90%, 91%, 92%, 93%, 94%, 95%, 96%, 97%, 98%, or 99% identical to SEQ ID NO: 232, or a fragment or variant thereof.

[0920] In preferred embodiments in that context, the composition is administered by ocular administration.

[0921] In preferred embodiments in that context, the ocular administration is selected from intravitreal or intraoperative administration.

[0922] In preferred embodiments in that context, the artificial nucleic acid is an RNA, preferably an mRNA.

[0923] In alternative embodiments in that context, the artificial nucleic acid is comprised in a viral vector, preferably an AAV vector.

[0924] Suitably, the at least one coding sequence of the artificial nucleic acid encoding the RUNX inhibitor comprises or consists of a nucleic acid sequence that is identical or at least 90%, 91%, 92%, 93%, 94%, 95%, 96%, 97%, 98%, or 99% identical to any one of the nucleic acid sequences SEQ ID NOs: 418 or 480, or a fragment or a variant of any of these.

[0925] In preferred embodiments, the nucleic acid, preferably the mRNA encoding the RUNX inhibitor comprises or consists of a nucleic acid sequence which is identical or at least 90%, 91%, 92%, 93%, 94%, 95%, 96%, 97%, 98%, or 99% identical to a nucleic acid sequence SEQ ID NOs: 1579 or 1580, or a fragment or variant of that sequence.

[0926] In preferred embodiments, the nucleic acid, preferably the mRNA encoding the RUNX inhibitor comprises or consists of a nucleic acid sequence which is identical or at least 90%, 91%, 92%, 93%, 94%, 95%, 96%, 97%, 98%, or 99% identical to a nucleic acid sequence SEQ ID NO: 1580, or a fragment or variant of that sequence.

[0927] In preferred embodiments in that context, the artificial nucleic acid of the composition is formulated in lipid-based carriers, preferably LNPs as defined in the context of the second aspect.

[0928] In preferred embodiments in that context, the ocular disease is associated with or caused by overexpressed RUNX and/or overactive RUNX, preferably RUNX1.

[0929] In preferred embodiments in that context, the ocular disease is associated with or caused by overexpressed RUNX and/or overactive RUNX, preferably, wherein the ocular disease is PVR.

### 6: A Method of Reducing the Activity of a Transcription Factor in a Cell or a Subject:

[0930] In a further aspect, the present invention relates to a method of reducing the activity of a transcription factor in a cell or a subject.

[0931] Notably, embodiments relating to the previous aspects (e.g. artificial nucleic acid, pharmaceutical composition) may likewise be read on and be understood as suitable embodiments of the method of reducing the activity of a transcription factor in a cell or a subject of the present aspect.

[0932] In preferred embodiments, the method of reducing the activity of a transcription factor in a cell or a subject comprises
[0933] a) applying or administering an artificial nucleic acid comprising at least one coding sequence encoding at least one transcription factor inhibitor as defined in the first aspect; or
[0934] b) applying or administering a pharmaceutical composition comprising the artificial nucleic acid comprising at least one coding sequence encoding at least one transcription factor inhibitor as defined in the second aspect;
[0935] to a cell, tissue, or subject, wherein the transcription factor inhibitor is produced in the cell, tissue, or subject after administration or application to said cell, tissue, or subject.

[0936] In preferred embodiments in that context, the transcription factor inhibitor is a transcription factor trap.

[0937] In various embodiments, the target transcription factor is selected from list A.

[0938] In preferred embodiments, the transcription factor inhibitor is produced in the cell, tissue, or subject after administration or application to said cell, tissue, or subject, wherein
[0939] the produced transcription factor inhibitor is a dominant negative inhibitor of the target transcription factor; and/or
[0940] the produced transcription factor inhibitor binds to the target transcription factor or binds to at least one transcription co-factor of the target transcription factor; and/or
[0941] the produced transcription factor inhibitor reduces or prevents interaction of a target transcription factor with its target DNA; and/or
[0942] the produced transcription factor inhibitor reduces or prevents interaction of a target transcription factor with at least one of its transcription co-factors; and/or
[0943] the produced transcription factor inhibitor reduces or prevents nuclear translocation of a target transcription factor; and/or
[0944] the produced transcription factor inhibitor or transcription factor trap reduces the activity of a target transcription factor; and/or
[0945] the produced transcription factor inhibitor or transcription factor trap reduces the cellular expression of a target transcription factor; and/or
[0946] the produced transcription factor inhibitor or transcription factor trap reduces the cellular expression of proteins that are controlled or regulated by a target transcription factor, and/or
[0947] the produced transcription factor inhibitor or transcription factor trap triggers plasma membrane anchoring of transcription factors.

[0948] In preferred embodiments, the produced transcription factor inhibitor is a RUNX inhibitor or a RUNX trap and the target transcription factor is a RUNX transcription factor, preferably RUNX1.

[0949] In preferred embodiments, the produced transcription factor inhibitor is a RUNX inhibitor or a RUNX trap, wherein the produced RUNX inhibitor or RUNX trap
[0950] sequesters cellular RUNX by binding to RUNX in the cytosol or sequesters cellular CBFbeta by binding to CBFbeta in the nucleus
[0951] reduces or prevents the interaction of cellular RUNX with cellular CBFbeta; and/or
[0952] reduces cellular RUNX-CBFbeta complex formation and/or activity; and/or
[0953] reduces the cellular expression of RUNX controlled or regulated gene products; and/or
[0954] reduces the cellular expression of TGFbeta2, SMAD3, and/or COL1A1; and/or
[0955] increase the transcription rate of MARVELD2; and/or
[0956] reduces the cellular expression of RUNX; and/or
[0957] reduces or prevents pathological epithelial to mesenchymal transition (EMT), pathological cell proliferation, aberrant angiogenesis, aberrant neovascularization, degeneration, and/or fibrosis; and/or
[0958] reduces or prevents cell proliferation and/or cell growth in eyes with PVR.

[0959] In embodiments, the applying or administering is selected from intramuscular, intranasal, transdermal, intradermal, intralesional, intracranial, subcutaneous, intracardial, intratumoral, intravenous, intrapulmonal, intraarticular, sublingual, pulmonary, intrathecal, local administration, or ocular administration.

[0960] In preferred embodiments, the ocular administration is selected from topical, intravitreal, intracameral, subconjunctival, subretinal, subtenon, retrobulbar, topical, orbital, suprachoroidal, posterior juxtascleral, or intraoperative administration, preferably intravitreal or intraoperative administration.

[0961] In another embodiment, the ocular administration may be via a device, for example a device for intravitreal delivery. Suitably, the device is configured to be a depot for the pharmaceutical composition. Such a device allows controlled administration to the eye (e.g. in regular intervals, e.g. one a day) e.g. via a port.

[0962] In preferred embodiments, an ocular administration leads to a production of the transcription factor inhibitor in cornea, lens, ciliary body, vitreous, sclera, choroid, retina, optic nerve, macula, scleral cells, choroid plexus epithelial cells, retinal cells, inflammatory cells, retinal pigment epithelium, Bruch's membrane, and retinal blood vessels or choroidal blood vessels.

[0963] In particularly preferred embodiments, an ocular administration leads to a production of the transcription factor inhibitor in cells and/or tissues of the eye, preferably in retinal pigment epithelial (RPE) cells or cells derived from RPE cells.

[0964] In preferred embodiments, an ocular administration leads to a production of the transcription factor inhibitor in retinal cells, preferably selected from photoreceptor cells, bipolar cells, ganglion cells, horizontal cells, Muller cells, mural cells, microglia, and amacrine cells. Particularly preferred are Muller cells, and microglia.

[0965] In particularly preferred embodiments, the reduction of the activity of a transcription factor is a transient reduction of the activity of a transcription factor. This is particularly important in the context of the whole invention, as a permanent reduction of the activity of a transcription factor would potentially be associated with side effects. Using a transient molecule such as mRNA is particularly suitable in that context as mRNA is typically degraded, and the encoded transcription factor trap protein has also a limited half-life (depending on the tissue, the protein sequence etc.).

[0966] In particularly preferred embodiments, the transcription factor inhibitor is a dominant negative inhibitor of the target transcription factor.

### Item List

[0967] Preferred embodiments of the present invention are provided in the following item list:
[0968] 1. An artificial nucleic acid comprising at least one coding sequence encoding at least one transcription factor inhibitor for reducing or inhibiting the activity of a target transcription factor in a cell, wherein the nucleic acid comprises at least one heterologous untranslated region (UTR).
[0969] 2. The artificial nucleic acid of item 1, wherein the transcription factor inhibitor is produced in the cytosol upon administration of the artificial nucleic acid to a cell, tissue, or subject.
[0970] 3. The artificial nucleic acid of item 1 or 2, wherein the transcription factor inhibitor is a dominant negative inhibitor of the target transcription factor and/or its transcription co-factor.
[0971] 4. The artificial nucleic acid of item 1 to 3, wherein the transcription factor inhibitor binds to the target transcription factor.
[0972] 5. The artificial nucleic acid of item 1 to 4, wherein the transcription factor inhibitor binds to at least one transcription co-factor of the target transcription factor, preferably a co-activator of the target transcription factor.
[0973] 6. The artificial nucleic acid of item 1 or 5, wherein the transcription factor inhibitor reduces or prevents interaction of the target transcription factor with its target DNA.
[0974] 7. The artificial nucleic acid of item 1 to 6, wherein the transcription factor inhibitor reduces or prevents interaction of the target transcription factor with at least one of its transcription co-factors.
[0975] 8. The artificial nucleic acid of item 1 to 7, wherein the transcription factor inhibitor reduces or prevents nuclear translocation of the target transcription factor and/or its transcription co-factor.
[0976] 9. The artificial nucleic acid of item 1 to 8, wherein the transcription factor inhibitor reduces the activity of the target transcription factor.
[0977] 10. The artificial nucleic acid of item 1 to 9, wherein the transcription factor inhibitor reduces the cellular expression of the target transcription factor.
[0978] 11. The artificial nucleic acid of item 1 to 10, wherein the transcription factor inhibitor reduces the cellular expression of proteins that are controlled or regulated by the target transcription factor.
[0979] 12. The artificial nucleic acid of any one of the preceding items, wherein the transcription factor inhibitor is a transcription factor trap preferably configured to bind and trap the target transcription factor in the cytosol.
[0980] 13. The artificial nucleic acid of any one of the preceding items, wherein the target transcription factor is selected from a transcription factor that has an aberrant or pathologic transcription factor activity.
[0981] 14. The artificial nucleic acid of any one of the preceding items, wherein the target transcription factor is selected from a transcription factor that has aberrant or pathologic transcription factor activity associated with epithelial to mesenchymal transition (EMT), pathological cell proliferation, aberrant angiogenesis, aberrant neovascularization, degeneration, and/or fibrosis.
[0982] 15. The artificial nucleic acid of any one of the preceding items, wherein the target transcription factor is selected from a transcription factor that is overexpressed and/or overactive in a disease, disorder, or condition, including e.g. aging.
[0983] 16. The artificial nucleic acid of any one of the preceding items, wherein the target transcription factor is selected from a transcription factor that is overexpressed and/or overactive in an ocular disease, disorder, or condition.
[0984] 17. The artificial nucleic acid of any one of the preceding items, wherein the target transcription factor is selected from AC008770.3; AC023509.3; AC092835.1; AC138696.1; ADNP; ADNP2; AEBP1; AEBP2; AHCTF1; AHDC1; AHR; AHRR; AIRE; AKAP8; AKAP8L; AKNA; ALX1; ALX3; ALX4; ANHX; ANKZF1; AP1; AR; ARGFX; ARHGAP35; ARID2; ARID3A; ARID3B; ARID3C; ARID5A; ARID5B; ARNT; ARNT2; ARNTL; ARNTL2; ARX; ASCL1; ASCL2; ASCL3; ASCL4; ASCL5; ASH1L; ATF1; ATF2; ATF3; ATF4; ATF5; ATF6; ATF6B; ATF7; ATMIN; ATOH1; ATOH7; ATOH8; BACH1; BACH2; BARHL1; BARHL2; BARX1; BARX2; BATF; BATF2; BATF3; BAZ2A; BAZ2B; BBX; BCL11A; BCL11B; BCL6; BCL6B; BHLHA15; BHLHA9; BHLHE22; BHLHE23; BHLHE40; BHLHE41; BNC1; BNC2; BORCS8-MEF2B; BPTF; BRF2; BSX; C11orf95; CAMTA1; CAMTA2; CARF; CASZ1; CBX2; CC2D1A; CCDC169-SOHLH2; CCDC17; CDC5L; CDX1; CDX2; CDX4; CEBPA; CEBPB; CEBPD; CEBPE; CEBPG; CEBPZ; CENPA; CENPB; CENPBD1; CENPS; CENPT; CENPX; CGGBP1; CHAMP1; CHCHD3; CIC; CLOCK; CPEB1; CPXCR1; CREB1; CREB3; CREB3L1; CREB3L2; CREB3L3; CREB3L4; CREB5; CREBL2; CREBZF; CREM; CRX; CSRNP1; CSRNP2; CSRNP3; CTCF; CTCFL; CUX1; CUX2; CXXC1; CXXC4; CXXC5; DACH1; DACH2; DBP; DBX1; DBX2; DDIT3; DEAF1; DLX1; DLX2; DLX3; DLX4; DLX5; DLX6; DMBX1; DMRT1; DMRT2; DMRT3; DMRTA1; DMRTA2; DMRTB1; DMRTC2; DMTF1; DNMT1; DNTTIP1; DOT1L; DPF1; DPF3; DPRX; DR1; DRAP1; DRGX; DUX1; DUX3; DUX4; DUXA; DZIP1; E2F1; E2F2; E2F3; E2F4; E2F5; E2F6; E2F7; E2F8; E4F1; EBF1; EBF2; EBF3; EBF4; EEA1; EGR1; EGR2; EGR3; EGR4; EHF; ELF1; ELF2; ELF3; ELF4; ELF5; ELK1; ELK3; ELK4; EMX1; EMX2; EN1; EN2; EOMES; EPAS1; ERF; ERG; ESR1; ESR2; ESRRA; ESRRB; ESRRG; ESX1; ETS1; ETS2; ETV1; ETV2; ETV3; ETV3L; ETV4; ETV5; ETV6; ETV7; EVX1; EVX2; FAM170A; FAM200B; FBXL19; FERD3L; FEV; FEZF1; FEZF2; FIGLA; FIZ1; FLI1; FLYWCH1; FOS; FOSB; FOSL1; FOSL2; FOXA1; FOXA2; FOXA3; FOXB1; FOXB2; FOXC1; FOXC2; FOXD1; FOXD2; FOXD3; FOXD4; FOXD4L1; FOXD4L3; FOXD4L4; FOXD4L5; FOXD4L6; FOXE1; FOXE3; FOXF1; FOXF2; FOXG1; FOXH1; FOXI1; FOXI2; FOXI3; FOXJ1; FOXJ2; FOXJ3; FOXK1; FOXK2; FOXL1; FOXL2; FOXM1; FOXN1; FOXN2; FOXN3; FOXN4; FOXO1; FOXO3; FOXO4; FOXO6; FOXP1; FOXP2; FOXP3; FOXP4; FOXQ1; FOXR1; FOXR2; FOXS1; GABPA; GATA1; GATA2; GATA3; GATA4; GATA5; GATA6; GATAD2A; GATAD2B; GBX1; GBX2; GCM1; GCM2; GFI1; GFI1B; GLI1; GLI2; GLI3; GLI4; GLIS1; GLIS2; GLIS3; GLMP; GLYR1; GMEB1; GMEB2; GPBP1; GPBP1L1; GRHL1; GRHL2; GRHL3; GSC; GSC2; GSX1; GSX2; GTF2B; GTF21; GTF2IRD1; GTF2IRD2; GTF2IRD2B; GTF3A; GZF1; HAND1; HAND2; HBP1; HDX; HELT; HES1; HES2; HES3; HES4; HES5; HES6; HES7; HESX1; HEY1; HEY2; HEYL; HHEX; HIC1; HIC2; HIF1A; HIF3A; HINFP; HIVEP1; HIVEP2; HIVEP3; HKR1; HLF; HLX; HMBOX1; HMG20A; HMG20B; HMGA1; HMGA2; HMGN3; HMX1; HMX2; HMX3; HNF1A; HNF1B; HNF4A; HNF4G; HOMEZ; HOXA1; HOXA10; HOXA11; HOXA13; HOXA2; HOXA3; HOXA4; HOXA5; HOXA6; HOXA7; HOXA9; HOXB1; HOXB13; HOXB2; HOXB3; HOXB4; HOXB5; HOXB6; HOXB7; HOXB8; HOXB9; HOXC10; HOXC11; HOXC12; HOXC13; HOXC4; HOXC5; HOXC6; HOXC8; HOXC9; HOXD1; HOXD10; HOXD11; HOXD12; HOXD13; HOXD3; HOXD4; HOXD8; HOXD9; HSF1; HSF2; HSF4; HSF5; HSFX1; HSFX2; HSFY1; HSFY2; IKZF1; IKZF2; IKZF3; IKZF4; IKZF5; INSM1; INSM2; IRF1; IRF2; IRF3; IRF4; IRF5; IRF6; IRF7; IRF8; IRF9; IRX1; IRX2; IRX3; IRX4; IRX5; IRX6; ISL1; ISL2; ISX; JAZF1; JDP2; JRK; JRKL; JUN; JUNB; JUND; KAT7; KCMF1; KCNIP3; KDM2A; KDM2B; KDM5B; KIN; KLF1; KLF10; KLF11; KLF12; KLF13; KLF14; KLF15; KLF16; KLF17; KLF2; KLF3; KLF4; KLF5; KLF6; KLF7; KLF8; KLF9; KMT2A; KMT2B; L3MBTL1; L3MBTL3; L3MBTL4; LBX1; LBX2; LCOR; LCORL; LEF1; LEUTX; LHX1; LHX2; LHX3; LHX4; LHX5; LHX6; LHX8; LHX9; LIN28A; LIN28B; LIN54; LMX1A; LMX1B; LTF; LYL1; MAF; MAFA; MAFB; MAFF; MAFG; MAFK; MAX; MAML1; MAML2; MAZ; MBD1; MBD2; MBD3; MBD4; MBD6; MBNL2; MECOM; MECP2; MEF2A; MEF2B; MEF2C; MEF2D; MEIS1; MEIS2; MEIS3; MEOX1; MEOX2; MESP1; MESP2; MGA; MITF; MIXL1; MKX; MLX; MLXIP; MLXIPL; MNT; MNX1; MSANTD1; MSANTD3; MSANTD4; MSC; MSGN1; MSX1; MSX2; MTERF1; MTERF2; MTERF3; MTERF4; MTF1; MTF2; MXD1; MXD3; MXD4; MXI1; MYB; MYBL1; MYBL2; MYC; MYCL; MYCN; MYF5; MYF6; MYNN; MYOD1; MYOG; MYPOP; MYRF; MYRFL; MYSM1; MYT1; MYT1L; MZF1; NACC2; NAIF1; NANOG; NANOGNB; NANOGP8; NCOA1; NCOA2; NCOA3; NEUROD1; NEUROD2; NEUROD4; NEUROD6; NEUROG1; NEUROG2; NEUROG3; NF kappa B; NFAT5; NFAT5A; NFATC1; NFATC2; NFATC3; NFATC4; NFE2; NFE2L1; NFE2L2; NFE2L3; NFE4; NFIA; NFIB; NFIC; NFIL3; NFIX; NFKB1; NFKB2; NFX1; NFXL1; NFYA; NFYB; NFYC; NHLH1; NHLH2; NKRF; NKX1-1; NKX1-2; NKX2-1; NKX2-2; NKX2-3; NKX2-4; NKX2-5; NKX2-6; NKX2-8; NKX3-1; NKX3-2; NKX6-1; NKX6-2; NKX6-3; NME2; NOBOX; NOTO; NOTCH1; NOTCH2; NOTCH3; NOTCH4; NPAS1; NPAS2; NPAS3; NPAS4; NROB1; NR1D1; NR1D2; NR1H2; NR1H3; NR1H4; NR112; NR113; NR2C1; NR2C2; NR2E1; NR2E3; NR2F1; NR2F2; NR2F6; NR3C1; NR3C2; NR4A1; NR4A2; NR4A3; NR5A1; NR5A2; NR6A1; NRF1; NRL; OLIG1; OLIG2; OLIG3; ONECUT1; ONECUT2; ONECUT3; OSR1; OSR2; OTP; OTX1; OTX2; OVOL1; OVOL2; OVOL3; PA2G4; PATZ1; PAX1; PAX2; PAX3; PAX4; PAX5; PAX6; PAX7; PAX8; PAX9; PBX1; PBX2; PBX3; PBX4; PCGF2; PCGF6; PDX1; PEG3; PGR; PHF1; PHF19; PHF20; PHF21A; PHOX2A; PHOX2B; PIN1; PITX1; PITX2; PITX3; PKNOX1; PKNOX2; PLAG1; PLAGL1; PLAGL2; PLSCR1; POGK; POU1F1; POU2AF1; POU2F1; POU2F2; POU2F3; POU3F1; POU3F2 (BRN2); POU3F3; POU3F4; POU4F1; POU4F2; POU4F3; POU5F1; POU5F1B; POU5F2; POU6F1; POU6F2; PPARA; PPARD; PPARG; PRDM1; PRDM10; PRDM12; PRDM13; PRDM14; PRDM15; PRDM16; PRDM2; PRDM4; PRDM5; PRDM6; PRDM8; PRDM9; PREB; PRMT3; PROP1; PROX1; PROX2; PRR12; PRRX1; PRRX2; PTF1A; PURA; PURB; PURG; RAG1; RARA; RARB; RARG; RAX; RAX2; RBAK; RBCK1; RBPJ; RBPJL; RBSN; REL; RELA; RELB; REPIN1; REST; REXO4; RFX1; RFX2; RFX3; RFX4; RFX5; RFX6; RFX7; RFX8; RHOXF1; RHOXF2; RHOXF2B; RLF; RORA; RORB; RORC; RREB1; RUNX1; RUNX2; RUNX3; RXRA; RXRB; RXRG; SAFB; SAFB2; SALL1; SALL2; SALL3; SALL4; SATB1; SATB2; SCMH1; SCML4; SCRT1; SCRT2; SCX; SEBOX; SETBP1; SETDB1; SETDB2; SGSM2; SHOX; SHOX2; SIM1; SIM2; SIX1; SIX2; SIX3; SIX4; SIX5; SIX6; SKI; SKIL; SKOR1; SKOR2; SLC2A4RG; SMAD1; SMAD3; SMAD4; SMAD5; SMAD9; SMYD3; SNAI1; SNAI2; SNAI3; SNAPC2; SNAPC4; SNAPC5; SOHLH1; SOHLH2; SON; SOX1; SOX10; SOX11; SOX12; SOX13; SOX14; SOX15; SOX17; SOX18; SOX2; SOX21; SOX3; SOX30; SOX4; SOX5; SOX6; SOX7; SOX8; SOX9; SP1; SP100; SP110; SP140; SP140L; SP2; SP3; SP4; SP5; SP6; SP7; SP8; SP9; SPDEF; SPEN; SPI1; SPIB; SPIC; SPZ1; SRCAP; SREBF1; SREBF2; SRF; SRY; ST18; STAT1; STAT2; STAT3; STAT4; STAT5A; STAT5B; STAT6; T; TAZ; TAL1; TAL2; TBP; TBPL1; TBPL2; TBR1; TBX1; TBX10; TBX15; TBX18; TBX19; TBX2; TBX20; TBX21; TBX22; TBX3; TBX4; TBX5; TBX6; TCF12; TCF15; TCF20; TCF21; TCF23; TCF24; TCF3; TCF4; TCF7; TCF7L1; TCF7L2; TCFL5; TEAD1; TEAD2; TEAD3; TEAD4; TEF; TERB1; TERF1; TERF2; TET1; TET2; TET3; TFAP2A; TFAP2B; TFAP2C; TFAP2D; TFAP2E; TFAP4; TFCP2; TFCP2L1; TFDP1; TFDP2; TFDP3; TFE3; TFEB; TFEC; TGIF1; TGIF2; TGIF2LX; TGIF2LY; THAP1; THAP10; THAP11; THAP12; THAP2; THAP3; THAP4; THAP5; THAP6; THAP7; THAP8; THAP9; THRA; THRB; THYN1; TIGD1; TIGD2; TIGD3; TIGD4; TIGD5; TIGD6; TIGD7; TLX1; TLX2; TLX3; TMF1; TOPORS; TP53; TP63; TP73; TPRX1; TRAFD1; TRERF1; TRPS1; TSC22D1; TSHZ1; TSHZ2; TSHZ3; TTF1; TWIST1; TWIST2; UBP1; UNCX; USF1; USF2; USF3; VAX1; VAX2; VDR; VENTX; VEZF1; VSX1; VSX2; WIZ; WT1; XBP1; XPA; YBX1; YAP; YBX2; YBX3; YY1; YY2; ZBED1; ZBED2; ZBED3; ZBED4; ZBED5; ZBED6; ZBED9; ZBTB1; ZBTB10; ZBTB11; ZBTB12; ZBTB14; ZBTB16; ZBTB17; ZBTB18; ZBTB2; ZBTB20; ZBTB21; ZBTB22; ZBTB24; ZBTB25; ZBTB26; ZBTB3; ZBTB32; ZBTB33; ZBTB34; ZBTB37; ZBTB38; ZBTB39; ZBTB4; ZBTB40; ZBTB41; ZBTB42; ZBTB43; ZBTB44; ZBTB45; ZBTB46; ZBTB47; ZBTB48; ZBTB49; ZBTB5; ZBTB6; ZBTB7A; ZBTB7B; ZBTB7C; ZBTB8A; ZBTB8B; ZBTB9; ZC3H8; ZEB1; ZEB2; ZFAT; ZFHX2; ZFHX3; ZFHX4; ZFP1; ZFP14; ZFP2; ZFP28; ZFP3; ZFP30; ZFP37; ZFP41; ZFP42; ZFP57; ZFP62; ZFP64; ZFP69; ZFP69B; ZFP82; ZFP90; ZFP91; ZFP92; ZFPM1; ZFPM2; ZFX; ZFY; ZGLP1; ZGPAT; ZHX1; ZHX2; ZHX3; ZIC1; ZIC2; ZIC3; ZIC4; ZIC5; ZIK1; ZIM2; ZIM3; ZKSCAN1; ZKSCAN2; ZKSCAN3; ZKSCAN4; ZKSCAN5; ZKSCAN7; ZKSCAN8; ZMAT1; ZMAT4; ZNF10; ZNF100; ZNF101; ZNF107; ZNF112; ZNF114; ZNF117; ZNF12; ZNF121; ZNF124; ZNF131; ZNF132; ZNF133; ZNF134; ZNF135; ZNF136; ZNF138; ZNF14; ZNF140; ZNF141; ZNF142; ZNF143; ZNF146; ZNF148; ZNF154; ZNF155; ZNF157; ZNF16; ZNF160; ZNF165; ZNF169; ZNF17; ZNF174; ZNF175; ZNF177; ZNF18; ZNF180; ZNF181; ZNF182; ZNF184; ZNF189; ZNF19; ZNF195; ZNF197; ZNF2; ZNF20; ZNF200; ZNF202; ZNF205; ZNF207; ZNF208; ZNF211; ZNF212; ZNF213; ZNF214; ZNF215; ZNF217; ZNF219; ZNF22; ZNF221; ZNF222; ZNF223; ZNF224; ZNF225; ZNF226; ZNF227; ZNF229; ZNF23; ZNF230; ZNF232; ZNF233; ZNF234; ZNF235; ZNF236; ZNF239; ZNF24; ZNF248; ZNF25; ZNF250; ZNF251; ZNF253; ZNF254; ZNF256; ZNF257; ZNF26; ZNF260; ZNF263; ZNF264; ZNF266; ZNF267; ZNF268; ZNF273; ZNF274; ZNF275; ZNF276; ZNF277; ZNF28; ZNF280A; ZNF280B; ZNF280C; ZNF280D; ZNF281; ZNF282; ZNF283; ZNF284; ZNF285; ZNF286A; ZNF286B; ZNF287; ZNF292; ZNF296; ZNF3; ZNF30; ZNF300; ZNF302; ZNF304; ZNF311; ZNF316; ZNF317; ZNF318; ZNF319; ZNF32; ZNF320; ZNF322; ZNF324; ZNF324B; ZNF326; ZNF329; ZNF331; ZNF333; ZNF334; ZNF335; ZNF337; ZNF33A; ZNF33B; ZNF34; ZNF341; ZNF343; ZNF345; ZNF346; ZNF347; ZNF35; ZNF350; ZNF354A; ZNF354B; ZNF354C; ZNF358; ZNF362; ZNF365; ZNF366; ZNF367; ZNF37A; ZNF382; ZNF383; ZNF384; ZNF385A; ZNF385B; ZNF385C; ZNF385D; ZNF391; ZNF394; ZNF395; ZNF396; ZNF397; ZNF398; ZNF404; ZNF407; ZNF408; ZNF41; ZNF410; ZNF414; ZNF415; ZNF416; ZNF417; ZNF418; ZNF419; ZNF420; ZNF423; ZNF425; ZNF426; ZNF428; ZNF429; ZNF43; ZNF430; ZNF431; ZNF432; ZNF433; ZNF436; ZNF438; ZNF439; ZNF44; ZNF440; ZNF441; ZNF442; ZNF443; ZNF444; ZNF445; ZNF446; ZNF449; ZNF45; ZNF451; ZNF454; ZNF460; ZNF461; ZNF462; ZNF467; ZNF468; ZNF469; ZNF470; ZNF471; ZNF473; ZNF474; ZNF479; ZNF48; ZNF480; ZNF483; ZNF484; ZNF485; ZNF486; ZNF487; ZNF488; ZNF490; ZNF491; ZNF492; ZNF493; ZNF496; ZNF497; ZNF500; ZNF501; ZNF502; ZNF503; ZNF506; ZNF507; ZNF510; ZNF511; ZNF512; ZNF512B; ZNF513; ZNF514; ZNF516; ZNF517; ZNF518A; ZNF518B; ZNF519; ZNF521; ZNF524; ZNF525; ZNF526; ZNF527; ZNF528; ZNF529; ZNF530; ZNF532; ZNF534; ZNF536; ZNF540; ZNF541; ZNF543; ZNF544; ZNF546; ZNF547; ZNF548; ZNF549; ZNF550; ZNF551; ZNF552; ZNF554; ZNF555; ZNF556; ZNF557; ZNF558; ZNF559; ZNF560; ZNF561; ZNF562; ZNF563; ZNF564; ZNF565; ZNF566; ZNF567; ZNF568; ZNF569; ZNF57; ZNF570; ZNF571; ZNF572; ZNF573; ZNF574; ZNF575; ZNF576; ZNF577; ZNF578; ZNF579; ZNF580; ZNF581; ZNF582; ZNF583; ZNF584; ZNF585A; ZNF585B; ZNF586; ZNF587; ZNF587B; ZNF589; ZNF592; ZNF594; ZNF595; ZNF596; ZNF597; ZNF598; ZNF599; ZNF600; ZNF605; ZNF606; ZNF607; ZNF608; ZNF609; ZNF610; ZNF611; ZNF613; ZNF614; ZNF615; ZNF616; ZNF618; ZNF619; ZNF620; ZNF621; ZNF623; ZNF624; ZNF625; ZNF626; ZNF627; ZNF628; ZNF629; ZNF630; ZNF639; ZNF641; ZNF644; ZNF645; ZNF646; ZNF648; ZNF649; ZNF652; ZNF653; ZNF654; ZNF655; ZNF658; ZNF66; ZNF660; ZNF662; ZNF664; ZNF665; ZNF667; ZNF668; ZNF669; ZNF670; ZNF671; ZNF672; ZNF674; ZNF675; ZNF676; ZNF677; ZNF678; ZNF679; ZNF680; ZNF681; ZNF682; ZNF683; ZNF684; ZNF687; ZNF688; ZNF689; ZNF69; ZNF691; ZNF692; ZNF695; ZNF696; ZNF697; ZNF699; ZNF7; ZNF70; ZNF700; ZNF701; ZNF703; ZNF704; ZNF705A; ZNF705B; ZNF705D; ZNF705E; ZNF705G; ZNF706; ZNF707; ZNF708; ZNF709; ZNF71; ZNF710; ZNF711; ZNF713; ZNF714; ZNF716; ZNF717; ZNF718; ZNF721; ZNF724; ZNF726; ZNF727; ZNF728; ZNF729; ZNF730; ZNF732; ZNF735; ZNF736; ZNF737; ZNF74; ZNF740; ZNF746; ZNF747; ZNF749; ZNF750; ZNF75A; ZNF75D; ZNF76; ZNF761; ZNF763; ZNF764; ZNF765; ZNF766; ZNF768; ZNF77; ZNF770; ZNF771; ZNF772; ZNF773; ZNF774; ZNF775; ZNF776; ZNF777; ZNF778; ZNF780A; ZNF780B; ZNF781; ZNF782; ZNF783; ZNF784; ZNF785; ZNF786; ZNF787; ZNF788; ZNF789; ZNF79; ZNF790; ZNF791; ZNF792; ZNF793; ZNF799; ZNF8; ZNF80; ZNF800; ZNF804A; ZNF804B; ZNF805; ZNF808; ZNF81; ZNF813; ZNF814; ZNF816; ZNF821; ZNF823; ZNF827; ZNF829; ZNF83; ZNF830; ZNF831; ZNF835; ZNF836; ZNF837; ZNF84; ZNF841; ZNF843; ZNF844; ZNF845; ZNF846; ZNF85; ZNF850; ZNF852; ZNF853; ZNF860; ZNF865; ZNF878; ZNF879; ZNF880; ZNF883; ZNF888; ZNF891; ZNF90; ZNF91; ZNF92; ZNF93; ZNF98; ZNF99; ZSCAN1; ZSCAN10; ZSCAN12; ZSCAN16; ZSCAN18; ZSCAN2; ZSCAN20; ZSCAN21; ZSCAN22; ZSCAN23; ZSCAN25; ZSCAN26; ZSCAN29; ZSCAN30; ZSCAN31; ZSCAN32; ZSCAN4; ZSCAN5A; ZSCAN5B; ZSCAN5C; ZSCAN9; ZUFSP; ZXDA; ZXDB; ZXDC; or ZZZ3.
[0985] 18. The artificial nucleic acid of any one of the preceding items, wherein the target transcription factor is selected from AP1; ATF6; ERG; ETV1; GLI3; HOXA9; MBD2; MEF2A; NF kappa B; POU3F2 (BRN2); PRDM13; RBPJ; RUNX1; RUNX2; SMAD3; SMAD4; SNAI1; TAZ; TCF21; TWIST1; MAML1; MAML2; EF2A; or YAP.
[0986] 19. The artificial nucleic acid of any one of the preceding items, wherein the target transcription factor is selected from GLI3; HOXA9; MBD2; MEF2A; POU3F2 (BRN2); PRDM13; RUNX1; SMAD3; SMAD4; or SNAI1.
[0987] 20. The artificial nucleic acid of any one of the preceding items, wherein the target transcription factor is a Runt-related transcription factor (RUNX), for example RUNX1, RUNX2, RUNX3.
[0988] 21. The artificial nucleic acid of any one of the preceding items, wherein the target transcription factor is RUNX1.
[0989] 22. The artificial nucleic acid of any one of the preceding items, wherein the transcription factor inhibitor comprises at least one amino acid sequence element A that is configured to bind to the target transcription factor or its transcription co-factor.
[0990] 23. The artificial nucleic acid of any one of the preceding items, wherein the transcription factor inhibitor comprises at least one amino acid sequence element A that comprises or consists of an amino acid sequence selected or derived from the target transcription factor, an interaction partner of the target transcription factor, a binding partner of the target transcription factor, a transcription co-factor of the target transcription factor, an antibody moiety, an intrabody moiety, a peptide-based aptamer, or a fragment or variant of any of these.
[0991] 24. The artificial nucleic acid of items 22 or 23, wherein the at least one amino acid sequence element A comprises or consists of an amino acid sequence that lacks a nuclear localization signal (NLS) or that has been modified to lack a functional NLS.
[0992] 25. The artificial nucleic acid of items 22 to 24, wherein the at least one amino acid sequence element A comprises or consists of an amino acid sequence selected or derived from a transcription co-factor of the target transcription factor, or a fragment or variant thereof.
[0993] 26. The artificial nucleic acid of items 25, wherein the transcription co-factor is selected from a transcription co-factor that forms a heterodimeric complex with the target transcription factor, preferably in the cytosol.
[0994] 27. The artificial nucleic acid of items 22 to 26, wherein the at least one amino acid sequence element A comprises or consists of an amino acid sequence selected or derived from a transcription co-factor of RUNX, or a fragment or variant thereof.
[0995] 28. The artificial nucleic acid of item 27, wherein the transcription co-factor of RUNX is selected or derived from CBFbeta, for example CBFbeta1 or CBFbeta2, or a fragment or variant thereof.
[0996] 29. The artificial nucleic acid of item 28, wherein the CBFbeta amino acid sequence is an N-terminal fragment of a human CBFbeta, preferably a fragment comprising amino acid 1 to amino acid 141 of CBFbeta, more preferably a fragment comprising amino acid 1 to amino acid 162 of CBFbeta.
[0997] 30. The artificial nucleic acid of any one of the preceding items, wherein the transcription factor inhibitor comprises at least one amino acid sequence element A that comprises or consists of an amino acid sequence selected or derived from CBFbeta being identical or at least 70%, 80%, 85%, 86%, 87%, 88%, 89%, 90%, 91%, 92%, 93%, 94%, 95%, 96%, 97%, 98%, or 99% identical to any one of SEQ ID NOs: 178-183, or fragments or variants of any of these.
[0998] 31. The artificial nucleic acid of item 22 to 24, wherein the at least one amino acid sequence element A comprises or consists of an amino acid sequence selected or derived from the target transcription factor, or a fragment or variant thereof.
[0999] 32. The artificial nucleic acid of item 31, wherein the amino acid sequence selected or derived from the target transcription factor comprises at least one amino acid substitution or deletion that reduces or prevents binding to its target DNA and/or at least one amino acid substitution or deletion that reduces or prevents nuclear translocation and/or at least one amino acid substitution or deletion that reduces or prevents homodimerization or heterodimerization.
[1000] 33. The artificial nucleic acid of item 31 or 32, wherein the at least one amino acid sequence element A comprises or consists of an amino acid sequence selected or derived from RUNX or a fragment or variant thereof, preferably wherein the RUNX amino acid sequence is an N-terminal fragment of a human RUNX1, e.g. a fragment comprising the Runt homology domain (RHD).
[1001] 34. The artificial nucleic acid of item 33, wherein at least one amino acid substitution in the RUNX1 amino acid sequence is selected from R80A, K83A, K83E, R135A, R139A, R142A, K167A, T169A, D171A, R174A, or R177A, or any functionally equivalent amino acid substitution at position R80, K83, R135, R139, R142, K167, T169, D171, R174, or R177.
[1002] 35. The artificial nucleic acid of item 33 or 34, wherein at least one amino acid substitution in the RUNX1 amino acid sequence is selected from R174Q and/or K83E, or any functionally equivalent amino acid substitution at position R174 and/or K83.
[1003] 36. The artificial nucleic acid of items 31 to 35, wherein the transcription factor inhibitor comprises at least one amino acid sequence element A that comprises or consists of an amino acid sequence selected or derived from RUNX1 being identical or at least 70%, 80%, 85%, 86%, 87%, 88%, 89%, 90%, 91%, 92%, 93%, 94%, 95%, 96%, 97%, 98%, or 99% identical to any one of SEQ ID NOs: 197-215, or fragments or variants of any of these.
[1004] 37. The artificial nucleic acid of any one of the preceding items, wherein the transcription factor inhibitor comprises at least one amino acid sequence element B that is configured to prevent or reduce the interaction of the target transcription factor with its target DNA.
[1005] 38. The artificial nucleic acid of any one of the preceding items, wherein the transcription factor inhibitor comprises at least one amino acid sequence element B that is configured to prevent or reduce interaction of the target transcription factor with at least one transcription co-factor of the target transcription factor.
[1006] 39. The artificial nucleic acid of any one of the preceding items, wherein the transcription factor inhibitor comprises at least one amino acid sequence element B that is configured to prevent or reduce nuclear translocation of the target transcription factor or its transcription co-factor.
[1007] 40. The artificial nucleic acid of any one of the preceding items, wherein the transcription factor inhibitor comprises at least one amino acid sequence element B that is configured to bind the target transcription factor or its transcription co-factor preferably in the cytosol.
[1008] 41. The artificial nucleic acid of any one of the preceding items, wherein the transcription factor inhibitor comprises at least one amino acid sequence element B that is configured to repress the transcription activity of the (cellular) target transcription factor.
[1009] 42. The artificial nucleic acid of any one of the preceding items, wherein the transcription factor inhibitor comprises at least one amino acid sequence element B that comprises or consists of an amino acid sequence selected or derived from a cytoplasmic protein, a protein that is associated with or binds to a cytoplasmic protein, or a fragment or variant thereof.
[1010] 43. The artificial nucleic acid of items 37 to 42, wherein the amino acid sequence element B is selected or derived from a cytoskeletal protein or a protein that is associated with or binds to a cytoskeletal protein, or a fragment or variant of any of these.
[1011] 44. The artificial nucleic acid of items 37 to 43, wherein the amino acid sequence element B is selected or derived from a myofibrillar protein, a microtubule protein, an intermediate filament protein, or a fragment or variant of any of these.
[1012] 45. The artificial nucleic acid of items 37 to 44, wherein the amino acid sequence element B is selected or derived from a peptide or protein that is associated with or binds to a myofibrillar protein, a microtubule protein, an intermediate filament protein, or a fragment or variant of any of these.
[1013] 46. The artificial nucleic acid of items 37 to 45, wherein the amino acid sequence element B is selected or derived from a protein that comprises an myofibrillar binding domain (e.g. actin), a microtubule binding domain, an intermediate filament binding domain.
[1014] 47. The artificial nucleic acid of items 37 to 46, wherein the amino acid sequence element B is selected or derived from a protein that comprises an actin binding domain.
[1015] 48. The artificial nucleic acid of items 37 to 47, wherein the amino acid sequence element B is selected from smooth muscle myosin heavy chain (SMMHC), or a fragment or variant thereof.
[1016] 49. The artificial nucleic acid of item 48, wherein the amino acid sequence selected or derived from SMMHC comprises at least one of a high-affinity binding domain (HABD) and/or an assembly competent domain (ACD) and/or a transcriptional repression domain (TRD), or fragments or variants of any of these.
[1017] 50. The artificial nucleic acid of item 48 or 49, wherein the SMMHC amino acid sequence is a C-terminal fragment of a human SMMHC, for example an SMMHC fragment comprising amino acid 1527 to amino acid 1972.
[1018] 51. The artificial nucleic acid of item 48 to 50, wherein the SMMHC amino acid sequence comprises a deletion in the C-terminus of about 95aa (SMMHCAC95), for example an SMMHC fragment comprising amino acid 1527 to amino acid 1877.
[1019] 52. The artificial nucleic acid of any one of the preceding items, wherein the transcription factor inhibitor comprises at least one amino acid sequence element B that comprises or consists of an amino acid sequence being identical or at least 70%, 80%, 85%, 86%, 87%, 88%, 89%, 90%, 91%, 92%, 93%, 94%, 95%, 96%, 97%, 98%, or 99% identical to any one of SEQ ID NOs: 184-193, 1521, 1522, or fragments or variants of any of these.
[1020] 53. The artificial nucleic acid of items 37 to 41, wherein the at least one element B comprises or consists of an amino acid sequence selected or derived from a transcriptional repressor of the target transcription factor, or a fragment or variant thereof.
[1021] 54. The artificial nucleic acid of items 53, wherein the transcriptional repressor of the target transcription factor is selected or derived from RUNX1T1a, RUNX1T1b, or a fragment or variant of any of these.
[1022] 55. The artificial nucleic acid of item 53 or 54, wherein the transcription factor inhibitor comprises at least one amino acid sequence element B that comprises or consists of an amino acid sequence being identical or at least 70%, 80%, 85%, 86%, 87%, 88%, 89%, 90%, 91%, 92%, 93%, 94%, 95%, 96%, 97%, 98%, or 99% identical to any one of SEQ ID NOs: 216-230, or fragments or variants of any of these.
[1023] 56. The artificial nucleic acid of items 37 to 41, wherein the at least one element B comprises or consists of an amino acid sequence selected or derived from a peptide or protein that promotes degradation of the target transcription factor, or a fragment or variant thereof.
[1024] 57. The artificial nucleic acid of items 56, wherein the peptide or protein that promotes degradation may be selected from a protein that binds to E3 ligase, preferably a protein selected from HIF1alpha, MDM2, or CRBN, or a fragment or variant of any of these.
[1025] 58. The artificial nucleic acid of items 56 or 57, wherein the peptide or protein that promotes degradation is selected or derived from HIF1alpha, preferably a HIF1alpha fragment comprising amino acid 549 to amino acid 575.
[1026] 59. The artificial nucleic acid of items 56 to 58, wherein the transcription factor inhibitor comprises at least one amino acid sequence element B that comprises or consists of an amino acid sequence being identical or at least 70%, 80%, 85%, 86%, 87%, 88%, 89%, 90%, 91%, 92%, 93%, 94%, 95%, 96%, 97%, 98%, or 99% identical to any one of SEQ ID NOs: 194 or 195, or fragments or variants of any of these.
[1027] 60. The artificial nucleic acid of any one of the preceding items, wherein the transcription factor inhibitor is a fusion protein that comprises or consists of at least one amino acid sequence element A and at least one amino acid sequence element B, preferably wherein the at least one element A is located at the N-terminus of the transcription inhibitor and the at least one element B is located at the C-terminus of the transcription inhibitor.
[1028] 61. The artificial nucleic acid of any one of the preceding items, wherein the transcription factor inhibitor comprises at least one further amino acid sequence element, preferably at least one further amino acid sequence element selected from a linker sequence, a transmembrane domain, a secretion signal, an element that extends protein half-life, or a fragment or variant of any of these.
[1029] 62. The artificial nucleic acid of item 61, wherein the at least one further amino acid sequence element is selected from a linker sequence, preferably a flexible linker, more preferably a flexible GGS linker according to SEQ ID NO: 196, or a variant thereof.
[1030] 63. The artificial nucleic acid of any one of the preceding items, wherein the transcription factor inhibitor is a RUNX inhibitor, preferably a RUNX1 inhibitor.
[1031] 64. The artificial nucleic acid of any one of the preceding items, wherein the transcription factor inhibitor is a RUNX trap, preferably a RUNX1 trap.
[1032] 65. The artificial nucleic acid of item 63 or 64, wherein the RUNX inhibitor, preferably the RUNX trap, comprises or consists of a fusion protein comprising a CBFbeta amino acid sequence element and an SMMHC amino acid sequence element.
[1033] 66. The artificial nucleic acid of any one of the preceding items, wherein the transcription factor inhibitor, preferably the RUNX trap, comprises or consists of an amino acid sequence being identical or at least 70%, 80%, 85%, 86%, 87%, 88%, 89%, 90%, 91%, 92%, 93%, 94%, 95%, 96%, 97%, 98%, or 99% identical to any one of SEQ ID NOs: 231-233, 1541-1548, or fragments or variants of any of these.
[1034] 67. The artificial nucleic acid of any one of the preceding items, wherein the transcription factor inhibitor, preferably the RUNX trap, comprises or consists of an amino acid sequence being identical or at least 70%, 80%, 85%, 86%, 87%, 88%, 89%, 90%, 91%, 92%, 93%, 94%, 95%, 96%, 97%, 98%, or 99% identical to SEQ ID NO: 232, or a fragment or variant thereof.
[1035] 68 The artificial nucleic acid of items 63 to 67, wherein the RUNX inhibitor, preferably the RUNX trap, sequesters cellular RUNX by binding to RUNX in the cytosol and preferably trapping RUNX1 in the cytosol.
[1036] 69. The artificial nucleic acid of item 63, wherein the RUNX inhibitor comprises or consists of a fusion protein comprising a CBFbeta amino acid sequence element and an HIF1alpha amino acid sequence element.
[1037] 70. The artificial nucleic acid of item 69, wherein the RUNX inhibitor comprises or consists of an amino acid sequence being identical or at least 70%, 80%, 85%, 86%, 87%, 88%, 89%, 90%, 91%, 92%, 93%, 94%, 95%, 96%, 97%, 98%, or 99% identical to any one of SEQ ID NOs: 234 or 235, or fragments or variants thereof.
[1038] 71. The artificial nucleic acid of 69 or 70, wherein the RUNX inhibitor degrades cellular RUNX.
[1039] 72. The artificial nucleic acid of items 63 to 71, wherein the RUNX inhibitor, preferably the RUNX trap, reduces or prevents the translocation of cellular CBFbeta from the cytosol to the nucleus by reducing or preventing its interaction with cellular RUNX.
[1040] 73. The artificial nucleic acid of item 63, wherein the RUNX inhibitor comprises or consists of a fusion protein comprising a RUNX1 amino acid sequence element and a RUNX1T1a or RUNX1T1b amino acid sequence element.
[1041] 74. The artificial nucleic acid of item 73, wherein the RUNX inhibitor comprises or consists of an amino acid sequence being identical or at least 70%, 80%, 85%, 86%, 87%, 88%, 89%, 90%, 91%, 92%, 93%, 94%, 95%, 96%, 97%, 98%, or 99% identical to any one of SEQ ID NOs: 236-239, or fragments or variants thereof.
[1042] 75. The artificial nucleic acid of item 63, wherein the RUNX inhibitor comprises or consists of an amino acid sequence being identical or at least 70%, 80%, 85%, 86%, 87%, 88%, 89%, 90%, 91%, 92%, 93%, 94%, 95%, 96%, 97%, 98%, or 99% identical to SEQ ID NO: 197, or a fragment or a variant thereof.
[1043] 76. The artificial nucleic acid of items 73 to 75, wherein the RUNX inhibitor sequesters cellular CBFbeta by binding to CBFbeta in the cytosol.
[1044] 77. The artificial nucleic acid of items 73 to 76, wherein the RUNX inhibitor drives transcriptional repression of genes that are under control of RUNX.
[1045] 78. The artificial nucleic acid of items 63 to 77, wherein the RUNX inhibitor, preferably the RUNX trap, reduces or prevents the interaction of cellular RUNX with cellular CBFbeta.
[1046] 79. The artificial nucleic acid of items 63 to 78, wherein the RUNX inhibitor, preferably the RUNX trap, reduces cellular RUNX-CBFbeta complex formation and/or activity.
[1047] 80. The artificial nucleic acid of items 63 to 79, wherein the RUNX inhibitor, preferably the RUNX trap, reduces the cellular expression of RUNX controlled or regulated gene products.
[1048] 81. The artificial nucleic acid of items 63 to 80, wherein the RUNX inhibitor, preferably the RUNX trap, reduces the cellular expression of TGFbeta2, SMAD3, and/or COL1A1.
[1049] 82. The artificial nucleic acid of items 63 to 81, wherein the RUNX inhibitor, preferably the RUNX trap, reduces the cellular expression of RUNX.
[1050] 83. The artificial nucleic acid of items 63 to 82, wherein the RUNX inhibitor, preferably the RUNX trap, reduces or prevents pathological epithelial to mesenchymal transition (EMT), pathological cell proliferation, aberrant angiogenesis, aberrant neovascularization, degeneration, and/or fibrosis.
[1051] 84. The artificial nucleic acid of any one of the preceding items, wherein the at least one coding sequence is a codon modified coding sequence, preferably wherein codon modified coding sequence is selected from a C maximized coding sequence, a CAI maximized coding sequence, human codon usage adapted coding sequence, a G/C content modified coding sequence, and a G/C optimized coding sequence, or any combination thereof, preferably wherein the at least one codon modified coding sequence is a G/C optimized coding sequence
[1052] 85. The artificial nucleic acid of any one of the preceding items, wherein the at least one coding sequence comprises a nucleic acid sequence encoding an amino acid sequence element A, wherein the nucleic acid sequence is identical or at least 70%, 80%, 85%, 86%, 87%, 88%, 89%, 90%, 91%, 92%, 93%, 94%, 95%, 96%, 97%, 98%, or 99% identical to any one of SEQ ID NOs: 240-245, 302-307, 364-369, 426-431, 488-493, 550-555, 612-617, 674-679, 736-741, or a fragment or a variant of any of these.
[1053] 86. The artificial nucleic acid of any one of the preceding items, wherein the at least one coding sequence comprises a nucleic acid sequence encoding an amino acid element B, wherein the nucleic acid sequence is identical or at least 70%, 80%, 85%, 86%, 87%, 88%, 89%, 90%, 91%, 92%, 93%, 94%, 95%, 96%, 97%, 98%, or 99% identical to any one of SEQ ID NOs: 246-255, 308-317, 370-379, 432-441, 494-503, 556-565, 618-627, 680-689, 742-751, 1523-1540, or a fragment or a variant of any of these.
[1054] 87. The artificial nucleic acid of any one of the preceding items, wherein the at least one coding sequence comprises or consists of a nucleic acid sequence encoding a transcription factor inhibitor, preferably a RUNX trap, that is identical or at least 70%, 80%, 85%, 86%, 87%, 88%, 89%, 90%, 91%, 92%, 93%, 94%, 95%, 96%, 97%, 98%, or 99% identical to any one of SEQ ID NOs: 293-295, 355-357, 417-419, 479-481, 541-543, 603-605, 665-667, 727-729, 789-791, 1549-1558, or a fragment or a variant of any of these.
[1055] 88. The artificial nucleic acid of any one of the preceding items, wherein the at least one coding sequence comprises or consists of a nucleic acid sequence encoding an transcription factor inhibitor, preferably a RUNX trap CBFbeta-SMMHC, that is identical or at least 70%, 80%, 90%, 91%, 92%, 93%, 94%, 95%, 96%, 97%, 98%, or 99% identical to SEQ ID NO: 418, or a fragment or a variant thereof.
[1056] 89. The artificial nucleic acid of items 1 to 85, wherein the at least one coding sequence comprises a nucleic acid sequence encoding an amino acid sequence element B, wherein the nucleic acid sequence is identical or at least 70%, 80%, 85%, 86%, 87%, 88%, 89%, 90%, 91%, 92%, 93%, 94%, 95%, 96%, 97%, 98%, or 99% identical to any one of SEQ ID NOs: 257, 319, 381, 443, 505, 567, 629, 691, 753, or a fragment or a variant of any of these.
[1057] 90. The artificial nucleic acid of items 89, wherein the at least one coding sequence comprises or consists of a nucleic acid sequence encoding a transcription factor inhibitor, preferably a RUNX inhibitor CBFbeta-HIF1alpha, that is identical or at least 70%, 80%, 85%, 86%, 87%, 88%, 89%, 90%, 91%, 92%, 93%, 94%, 95%, 96%, 97%, 98%, or 99% identical to any one of SEQ ID NOs: 296-297, 358-359, 420-421, 482-483, 544-545, 606-607, 668-669, 730-731, 792-793, or a fragment or a variant of any of these.
[1058] 91. The artificial nucleic acid of items 1 to 84, wherein the at least one coding sequence comprises a nucleic acid sequence encoding an amino acid element A, wherein the nucleic acid sequence is identical or at least 70%, 80%, 85%, 86%, 87%, 88%, 89%, 90%, 91%, 92%, 93%, 94%, 95%, 96%, 97%, 98%, or 99% identical to any one of SEQ ID NOs: 259-277, 321-339, 383-401, 445-463, 507-525, 569-587, 631-649, 693-711, 755-773, or a fragment or a variant of any of these.
[1059] 92. The artificial nucleic acid of item 91, wherein the at least one coding sequence comprises a nucleic acid sequence encoding an amino acid element B, wherein the nucleic acid sequence is identical or at least 70%, 80%, 85%, 86%, 87%, 88%, 89%, 90%, 91%, 92%, 93%, 94%, 95%, 96%, 97%, 98%, or 99% identical to any one of SEQ ID NOs: 278-292, 340-354, 402-416, 464-478, 526-540, 588-602, 650-664, 712-726, 774-788, or a fragment or a variant of any of these.
[1060] 93. The artificial nucleic acid of items 91 to 92, wherein the at least one coding sequence comprises or consists of a nucleic acid sequence encoding a transcription factor inhibitor, preferably a RUNX inhibitor RUNX1-RUNX1T1, that is identical or at least 70%, 80%, 85%, 86%, 87%, 88%, 89%, 90%, 91%, 92%, 93%, 94%, 95%, 96%, 97%, 98%, or 99% identical to any one of the nucleic acid sequences SEQ ID NOs: 298-301, 360-363, 422-425, 484-487, 546-549, 608-611, 670-673, 732-735, 794-797, or a fragment or a variant of any of these.
[1061] 94. The artificial nucleic acid of item 1 to 84, wherein the at least one coding sequence comprises or consists of a nucleic acid sequence encoding a transcription factor inhibitor, preferably a RUNX inhibitor RUNX1 (K83E,R174Q), that is identical or at least 70%, 80%, 85%, 86%, 87%, 88%, 89%, 90%, 91%, 92%, 93%, 94%, 95%, 96%, 97%, 98%, or 99% identical to any one of the nucleic acid sequences SEQ ID NOS: 259, 321, 383, 445, 507, 569, 631, 693, 755, or a fragment or a variant of any of these.
[1062] 95. The artificial nucleic acid of any one of the preceding items, wherein the at least one heterologous untranslated region (UTR) is selected from at least one heterologous 5′-UTR and/or at least one heterologous 3′-UTR.
[1063] 96. The artificial nucleic acid of item 95, wherein the at least one heterologous 3′-UTR comprises or consists of a nucleic acid sequence derived from a 3′-UTR of a gene selected from PSMB3, ALB7, alpha-globin, CASP1, COX6B1, GNAS, NDUFA1 and RPS9, or from a homolog, a fragment or a variant of any one of these genes, preferably wherein the at least one heterologous 3′-UTR comprises or consists of a nucleic acid sequence being identical or at least 70%, 80%, 85%, 86%, 87%, 88%, 89%, 90%, 91%, 92%, 93%, 94%, 95%, 96%, 97%, 98%, or 99% identical to SEQ ID NOs: 67-90, 109-120, or a fragment or a variant of any of these.
[1064] 97. The artificial nucleic acid of item 95 or 96, wherein the at least one heterologous 5′-UTR comprises or consists of a nucleic acid sequence derived from a 5′-UTR of a gene selected from HSD17B4, RPL32, ASAH1, ATP5A1, MP68, NDUFA4, NOSIP, RPL31, SLC7A3, TUBB4B and UBQLN2, or from a homolog, a fragment or variant of any one of these genes, preferably selected from HSD17B4, preferably wherein the at least one heterologous 3′-UTR comprises or consists of a nucleic acid sequence being identical or at least 70%, 80%, 85%, 86%, 87%, 88%, 89%, 90%, 91%, 92%, 93%, 94%, 95%, 96%, 97%, 98%, or 99% identical to SEQ ID NOs: 1-32, 65-66, or a fragment or a variant of any of these.
[1065] 98. The artificial nucleic acid of items 95 to 97, wherein the at least one heterologous 5′-UTR is selected from HSD17B4 and the at least one heterologous 3′ UTR is selected from PSMB3.
[1066] 99. The artificial nucleic acid of items 95 to 98, wherein the at least one heterologous 3′-UTR comprises or consists of a nucleic acid sequence being identical or at least 70%, 80%, 85%, 86%, 87%, 88%, 89%, 90%, 91%, 92%, 93%, 94%, 95%, 96%, 97%, 98%, or 99% identical to SEQ ID NO: 68, or a fragment or a variant thereof.
[1067] 100. The artificial nucleic acid of items 95 to 99, wherein the at least one heterologous 5′-UTR comprises or consists of a nucleic acid sequence being identical or at least 70%, 80%, 85%, 86%, 87%, 88%, 89%, 90%, 91%, 92%, 93%, 94%, 95%, 96%, 97%, 98%, or 99% identical to SEQ ID NO: 2, or a fragment or a variant thereof.
[1068] 101. The artificial nucleic acid of any one of the preceding items, additionally comprising at least one poly(A) sequence, preferably wherein the at least one poly(A) sequence comprises about 40 to about 500 adenosine nucleotides, preferably about 60 to about 250 adenosine nucleotides, more preferably about 60 to about 150 adenosine nucleotides.
[1069] 102. The artificial nucleic acid of item 101, wherein the at least one poly(A) sequence comprises about 100 adenosine nucleotides.
[1070] 103. The artificial nucleic acid of item 101 or 102, wherein the at least one poly(A) sequence is located at the 3′ terminus, optionally, wherein the 3′ terminal nucleotide is an adenosine.
[1071] 104. The artificial nucleic acid of any one of the preceding items, additionally comprising at least one poly(C) sequence and/or at least one miRNA binding site and/or histone stem-loop sequence.
[1072] 105. The artificial nucleic acid of item 104, wherein the histone stem-loop sequence comprises or consists of a nucleic acid sequence identical or at least 70%, 80%, 90%, 91%, 92%, 93%, 94%, 95%, 96%, 97%, 98%, or 99% identical to any one of SEQ ID NO: 137, or a fragment or a variant thereof.
[1073] 106. The artificial nucleic acid of any one of the preceding items, wherein the nucleic acid is an isolated nucleic acid.
[1074] 107. The artificial nucleic acid of any one of the preceding items, wherein the artificial nucleic acid is a DNA, preferably a viral DNA, more preferably an Adeno-associated virus DNA.
[1075] 108. The artificial nucleic acid of items 1 to 106, wherein the artificial nucleic acid is an RNA.
[1076] 109. The artificial nucleic acid of item 108, wherein the RNA is selected from mRNA, circular RNA, replicon RNA, or viral RNA.
[1077] 110. The artificial nucleic acid of item 108 or 109, wherein the RNA is an mRNA.
[1078] 111a. The artificial nucleic acid of any one of the preceding items, wherein the nucleic acid, preferably the RNA, comprises at least one modified nucleotide, preferably selected from pseudouridine (ψ) or N1-methylpseudouridine (m1ψ).
[1079] 111b. The artificial nucleic acid of item 111a, wherein the nucleic acid, preferably the RNA, comprises N1-methylpseudouridine (m1ψ).
[1080] 111c. The artificial nucleic acid of item 111a or 111b, wherein the nucleic acid is a modified RNA wherein each Uracil is substituted by N1-methylpseudouridine (m1ψ).
[1081] 112. The artificial nucleic acid of any one of the preceding items, wherein the nucleic acid, preferably the RNA, comprises a 5′-cap structure.
[1082] 113. The artificial nucleic acid of item 112, wherein the 5′-cap structure is selected from a cap1 structure or a modified cap1 structure.
[1083] 114. The artificial nucleic acid of any one of the preceding items, wherein the nucleic acid is an in vitro transcribed RNA, preferably wherein RNA in vitro transcription has been performed in the presence of a sequence optimized nucleotide mixture.
[1084] 115. The artificial nucleic acid of any one of the preceding items, wherein the nucleic acid is a purified RNA, preferably wherein the RNA has been purified by RP-HPLC, AEX, SEC, hydroxyapatite chromatography, TFF, filtration, precipitation, core-bead flow through chromatography, oligo(dT) purification, cellulose-based purification, or any combination thereof.
[1085] 116. The artificial nucleic acid of item 115, wherein the at least one step of purification is selected from RP-HPLC and/or TFF.
[1086] 117. The artificial nucleic acid of any one of the preceding items, wherein the nucleic acid, preferably the RNA, has an integrity of at least about 50%, preferably of at least about 60%, more preferably of at least about 70%, most preferably of at least about 80%
[1087] 118. The artificial nucleic acid of any one of the preceding items, wherein the nucleic acid, preferably the RNA, is suitable for use in treatment or prevention of a disease, disorder or condition, preferably an ocular disease, disorder or condition
[1088] 119. The artificial nucleic acid of any one of the preceding items, wherein the nucleic acid, preferably the RNA, comprises the following sequence elements preferably in 5′- to 3′-direction:
   [1089] A) a 5′-cap structure;
   [1090] B) a 5′-UTR preferably selected or derived from a 5′-UTR of a HSD17B4 gene;
   [1091] C) a coding sequence encoding a transcription factor inhibitor, preferably a RUNX inhibitor;
   [1092] D) a 3′-UTR preferably selected or derived from a 3′-UTR of a PSMB3 gene;
   [1093] E) optionally, a histone stem-loop; and
   [1094] F) a poly(A) sequence preferably comprising about 100 A nucleotides.
[1095] 120. The artificial nucleic acid of any one of the preceding items, wherein the nucleic acid, preferably the RNA, comprises or consists of a nucleic acid sequence which is identical or at least 70%, 80%, 85%, 86%, 87%, 88%, 89%, 90%, 91%, 92%, 93%, 94%, 95%, 96%, 97%, 98%, or 99% identical to a nucleic acid sequence selected from the group consisting of SEQ ID NOs: 798-1517, 1559-1582, or a fragment or variant of any of these sequences.
[1096] 121. The artificial nucleic acid of any one of the preceding items, wherein the nucleic acid, preferably the RNA, comprises or consists of a nucleic acid sequence which is identical or at least 70%, 80%, 85%, 86%, 87%, 88%, 89%, 90%, 91%, 92%, 93%, 94%, 95%, 96%, 97%, 98%, or 99% identical to a nucleic acid sequence selected from SEQ ID NOs: 799-801, 809-811, 819-821, 829-831, 839-841, 849-851, 859-861, 869-871, 879-881, 889-891, 899-901, 909-911, 919-921, 929-931, 939-941, 949-951, 959-961, 969-971, 979-981, 989-991, 999-1001, 1009-1011, 1019-1021, 1029-1031, 1039-1041, 1049-1051, 1059-1061, 1069-1071, 1079-1081, 1089-1091, 1099-1101, 1109-1111, 1119-1121, 1129-1131, 1139-1141, 1149-1151, 1159-1161, 1169-1171, 1179-1181, 1189-1191, 1199-1201, 1209-1211, 1219-1221, 1229-1231, 1239-1241, 1249-1251, 1259-1261, 1269-1271, 1279-1281, 1289-1291, 1299-1301, 1309-1311, 1319-1321, 1329-1331, 1339-1341, 1349-1351, 1359-1361, 1369-1371, 1379-1381, 1389-1391, 1399-1401, 1409-1411, 1419-1421, 1429-1431, 1439-1441, 1449-1451, 1459-1461, 1469-1471, 1479-1481, 1489-1491, 1499-1501, 1509-1511, 1559-1582, or a fragment or variant of any of these sequences.
[1097] 122. The artificial nucleic acid of any one of the preceding items, wherein the nucleic acid, preferably the RNA, comprises or consists of a nucleic acid sequence which is identical or at least 70%, 80%, 85%, 86%, 87%, 88%, 89%, 90%, 91%, 92%, 93%, 94%, 95%, 96%, 97%, 98%, or 99% identical to a nucleic acid sequence selected from SEQ ID NOs: 800, 810, 820, 830, 840, 850, 860, 870, 880, 890, 900, 910, 920, 930, 940, 950, 960, 970, 1567, 1568, 1577, 1578-1582, 980, 990, 1000, 1010, 1020, 1030, 1040, 1050, 1060, 1070, 1080, 1090, 1100, 1110, 1120, 1130, 1140, 1150, 1160, 1170, 1180, 1190, 1200, 1210, 1220, 1230, 1240, 1250, 1260, 1270, 1280, 1290, 1300, 1310, 1320, 1330, 1340, 1350, 1360, 1370, 1380, 1390, 1400, 1410, 1420, 1430, 1440, 1450, 1460, 1470, 1480, 1490, 1500, 1510, or a fragment or variant of any of these sequences.
[1098] 123a. The artificial nucleic acid of any one of the preceding items, wherein the nucleic acid, preferably the RNA, comprises or consists of a nucleic acid sequence which is identical or at least 70%, 80%, 90%, 91%, 92%, 93%, 94%, 95%, 96%, 97%, 98%, or 99% identical to a nucleic acid sequence selected from SEQ ID NOS: 820, 1579, 1581, 910, 1580, 1582, or a fragment or variant of that sequence.
[1099] 123b. The artificial nucleic acid of any one of the preceding items, wherein the nucleic acid, preferably the RNA, comprises or consists of a nucleic acid sequence which is identical or at least 90% identical to a nucleic acid sequence selected from SEQ ID NOs: 1579 or 1580, or a fragment or variant of that sequence.
[1100] 123c. The artificial nucleic acid of item 123a or 123b, wherein the nucleic acid, preferably the RNA, comprises or consists of a nucleic acid sequence which is identical to the nucleic acid sequence SEQ ID NO: 1580.
[1101] 124. A pharmaceutical composition comprising at least one artificial nucleic acid comprising at least one coding sequence encoding at least one RUNX transcription factor inhibitor as defined in any one of the items 1 to 123c.
[1102] 125. The pharmaceutical composition of item 124, comprising at least one pharmaceutically acceptable carrier or excipient.
[1103] 126. The pharmaceutical composition of item 124 or 125, wherein the at least one artificial nucleic acid is formulated in at least one cationic or polycationic compound.
[1104] 127. The pharmaceutical composition of item 126, wherein the at least one cationic or polycationic compound is selected from a cationic or polycationic polymer, a cationic or polycationic polysaccharide, a cationic or polycationic lipid, a cationic or polycationic protein, a cationic or polycationic peptide, or any combinations thereof.
[1105] 128. The pharmaceutical composition of item 127, wherein the one or more cationic or polycationic peptides are selected from SEQ ID NOs: 173-177, or any combinations thereof.
[1106] 129. The pharmaceutical composition of item 127, wherein the cationic or polycationic polymer is selected from a polyethylene glycol/peptide polymer, preferably comprising HO-PEG5000-S-(S-CHHHHHHRRRRHHHHHHC-S-)7-S-PEG5000-OH (SEQ ID NO: 176 as peptide monomer), HO-PEG5000-S-(S-CHHHHHHRRRRHHHHHHC-S-) 4-S-PEG5000-OH (SEQ ID NO: 176 as peptide monomer), HO-PEG5000-S-(S-CGHHHHHRRRRHHHHHGC-S-) 7-S-PEG5000-OH (SEQ ID NO: 177 as peptide monomer), or HO-PEG5000-S-(S-CGHHHHHRRRRHHHHHGC-S-) 4-S-PEG5000-OH (SEQ ID NO: 177 as peptide monomer).
[1107] 130. The pharmaceutical composition of item 127 or 129, wherein the cationic or polycationic polymer additionally comprises at least one lipidoid component.
[1108] 131. The pharmaceutical composition of item 130, wherein the at least one lipidoid component is selected from 3-C12-OH, 3-C12-OH-cat, or 3-C12-C3-OH.
[1109] 132. The pharmaceutical composition of items 124 to 127, wherein the at least one artificial nucleic acid is formulated in lipid-based carriers.
[1110] 133. The pharmaceutical composition of item 132, wherein the lipid-based carriers are selected from liposomes, lipid nanoparticles, lipoplexes, solid lipid nanoparticles, lipo-polylexes, and/or nanoliposomes.
[1111] 134. The pharmaceutical composition of item 132 or 133, wherein the lipid-based carriers are lipid nanoparticles, preferably wherein the lipid nanoparticles encapsulate the artificial nucleic acid.
[1112] 135. The pharmaceutical composition of items 132 to 134, wherein the lipid-based carriers (e.g. LNPs) of the pharmaceutical composition comprise a cationic lipid selected or derived from 9-Heptadecanyl 8-{(2-hydroxyethyl)[6-oxo-6-(undecyloxy)hexyl]amino}octanoate, also referred to as SM-102.
[1113] 136. The pharmaceutical composition of items 132 to 135, wherein the lipid-based carriers comprise at least one lipid selected from an aggregation-reducing lipid, a cationic lipid or ionizable lipid, a neutral lipid or phospholipid, or a steroid or steroid analog, or any combinations thereof.
[1114] 137a. The pharmaceutical composition of item 136, wherein the I aggregation reducing lipid selected from a polymer conjugated lipid.
[1115] 137b. The pharmaceutical composition of item 137a, wherein the polymer conjugated lipid is selected from a PEG-conjugated lipid or a PEG-free lipid.
[1116] 138. The pharmaceutical composition of item 137a or 137b, wherein the polymer conjugated lipid is selected or derived from DMG-PEG 2000, C10-PEG2K, Cer8-PEG2K, a POZ-lipid, or ALC-0159.
[1117] 139. The pharmaceutical composition of item 137 or 138, wherein the polymer conjugated lipid is not a PEG-conjugated lipid.
[1118] 140a. The pharmaceutical composition of item 136 to 139, wherein the cationic lipid or ionizable lipid is selected from an amino lipid, preferably wherein the amino lipid comprises a tertiary amine group
[1119] 140b. The pharmaceutical composition of item 136 or 140a, wherein one cationic or ionizable lipid is a lipid selected or derived from formula (III-1)

[chemical structure]

[1120] preferably, wherein one of L1 or L2 is —O(C═O)—, —(C═O)O—, —C(═O)—, —O—, —S(O)x-, —S—S—, —C(═O)S—, SC(═O)—, —NRaC(═O)—, —C(═O)NRa—, —NRaC(═O)NRa—, —OC(═O)NRa— or —NRaC(═O)O—, and the other of L1 or L2 is —O(C═O)—, —(C═O)O—, —C(═O)—, —O—, —S(O)x-, —S S—, —C(═O)S—, SC(═O)—, —NRaC(═O)—, —C(═O)NRa—, —NRaC(═O)NRa—, —OC(═O)NRa— or —NRaC(═O)O— or a direct bond; G1 and G2 are each independently unsubstituted C1-C12 alkylene or C1-C12 alkenylene; G3 is C1-C24 alkylene, C1-C24 alkenylene, C3-C8 cycloalkylene, C3-C8 cycloalkenylene; Ra is H or C1-C12 alkyl; R1 and R2 are each independently C6-C24 alkyl or C6-C24 alkenyl; R3 is H, OR5, CN, C(═O) OR4, OC(═O) R4 or —NR5C(═O) R4; R4 is C1-C12 alkyl; R5 is H or C1-C6 alkyl; and x is 0, 1 or 2.
[1121] 140c. The pharmaceutical composition of item 136 to 140b, wherein one cationic or ionizable lipid is selected or derived from a lipid according to formula III-3:

[chemical structure]

[1122] 140d. The pharmaceutical composition of items 132 to 140c, wherein the lipid-based carriers comprise a cationic lipid selected or derived from ALC-0315, SM-102, SS-33/4PE-15, HEXA-C5DE-PipSS, or compound C26.
[1123] 141. The pharmaceutical composition of items 132 to 140d, wherein the lipid-based carriers comprise a neutral lipid selected or derived from DSPC, DHPC, or DphyPE.
[1124] 142. The pharmaceutical composition of items 132 to 141, wherein the lipid-based carriers comprise a steroid or steroid analog selected or derived from cholesterol, cholesteryl hemisuccinate (CHEMS), preferably cholesterol.
[1125] 143. The pharmaceutical composition of items 132 to 142, wherein the lipid-based carriers comprise
   [1126] (i) at least one cationic lipid, preferably as defined in item 140;
   [1127] (ii) at least one neutral lipid, preferably as defined in item 141;
   [1128] (iii) at least one steroid or steroid analogue, preferably as defined in item 142; and
   [1129] (iv) at least one aggregation reducing lipid, preferably as defined in items 137 to 139.
[1130] 144a. The pharmaceutical composition of items 132 to 143, wherein the lipid-based carriers comprise
   [1131] (i) at least one cationic lipid selected from ALC-0315;
   [1132] (ii) at least one neutral lipid selected from DSPC;
   [1133] (iii) at least one steroid or steroid analogue selected from cholesterol; and
   [1134] (iv) at least one aggregation reducing lipid selected from ALC-0159.
[1135] 144b. The pharmaceutical composition of items 132 to 144a, wherein the lipid-based carriers comprise
   [1136] (i) at least one cationic lipid selected from lipid SM-102
   [1137] (ii) at least one neutral lipid selected from DSPC
   [1138] at least one steroid or steroid analogue selected from cholesterol
   [1139] (iv) at least one aggregation reducing lipid selected from-PEG 2000.
[1140] 145. The pharmaceutical composition of items 132 to 144b, wherein the lipid-based carriers comprise about 20-60% cationic lipid, about 5-25% neutral lipid, about 25-55% steroid or steroid analogue, and about 0.5-15% aggregation reducing lipid.
[1141] 146. The pharmaceutical composition of items 132 to 145, wherein the wt/wt ratio of lipid to nucleic acid in the lipid-based carrier is from about 10:1 to about 60:1, preferably from about 20:1 to about 30:1.
[1142] 147. The pharmaceutical composition of items 132 to 146, wherein the N/P ratio of the lipid-based carriers encapsulating the nucleic acid is in a range from about 1 to about 10, preferably in a range from about 5 to about 7.
[1143] 148. The pharmaceutical composition of items 132 to 147, wherein the lipid-based carriers have a Z-average size in a range of about 50 nm to about 120 nm.
[1144] 149. The pharmaceutical composition of items 124 to 148, additionally comprising at least one antagonist of at least one RNA sensing pattern recognition receptor selected from a Toll-like receptor, preferably a TLR7 antagonist and/or a TLR8 antagonist.
[1145] 150. The pharmaceutical composition of items 124 to 149, additionally comprising at least one small molecule inhibitor an inhibitory nucleic acid (siRNA) of the target transcription factor, preferably a small molecule inhibitor or an inhibitory nucleic acid (siRNA) of RUNX.
[1146] 151. The pharmaceutical composition of items 124 to 150, wherein the composition is a liquid composition or a dried composition.
[1147] 152. The pharmaceutical composition or the artificial nucleic acid of any one of the preceding items, wherein upon intramuscular, intranasal, transdermal, intradermal, intralesional, intracranial, subcutaneous, intracardial, intratumoral, intravenous, intrapulmonal, intraarticular, sublingual, pulmonary, intrathecal, or ocular administration of the composition or nucleic acid to a cell, tissue, or subject, the transcription factor inhibitor is produced.
[1148] 153. The pharmaceutical composition or the artificial nucleic acid of any one of the preceding items, wherein upon local administration of the composition or nucleic acid to a cell, tissue, or subject, the transcription factor inhibitor is produced.
[1149] 154. The pharmaceutical composition or the artificial nucleic acid of item 152 or 153, wherein the administration is an ocular administration.
[1150] 155. The pharmaceutical composition or the artificial nucleic acid of item 154, wherein the ocular administration is selected from topical, intravitreal, intracameral, subconjunctival, subretinal, subtenon, retrobulbar, topical, orbital, suprachoroidal, posterior juxtascleral, or intraoperative administration, preferably intravitreal or intraoperative administration.
[1151] 156. The pharmaceutical composition or the artificial nucleic acid of any one of the preceding items, wherein the administration is performed into a tamponade agent-filled human eye.
[1152] 157. The pharmaceutical composition or the artificial nucleic acid of item 156 wherein the tamponade agent is a gas agent or a silicone agent.
[1153] 158. The pharmaceutical composition or the artificial nucleic acid of any of the preceding items, wherein the ocular administration is performed using lipid-based carriers, preferably lipid nanoparticles (LNPs) as defined in item 144a or 144b.
[1154] 159. The pharmaceutical composition or the artificial nucleic acid of item 158, wherein the lipid-based carriers are LNPs composed of lipids as defined in items 144a or 144b
[1155] 160. The pharmaceutical composition or the artificial nucleic acid of any one of the preceding items, wherein ocular administration of the composition or the nucleic acid leads to a production of the transcription factor inhibitor in cells and/or tissues of the eye, preferably in cells and/or tissues selected from cornea, lens, ciliary body, vitreous, sclera, choroid, retina, optic nerve, macula, scleral cells, choroid plexus epithelial cells, retinal cells, inflammatory cells, retinal pigment epithelium (RPE), Bruch's membrane, and retinal or choroidal blood vessels.
[1156] 161. The pharmaceutical composition or the artificial nucleic acid of any one of the preceding items, wherein ocular administration of the composition or the nucleic acid leads to a production of the transcription factor inhibitor in retinal pigment epithelial (RPE) cells or cells derived from them.
[1157] 162. The pharmaceutical composition or the artificial nucleic acid of any one of the preceding items, wherein ocular administration of the composition or the nucleic acid leads to a production of the transcription factor inhibitor in retinal cells selected from photoreceptor cells, bipolar cells, ganglion cells, horizontal cells, Muller cells, mural cells, microglia, and amacrine cells.
[1158] 163a. A pharmaceutical composition comprising at least one mRNA encoding a therapeutic protein, formulated in a lipid nanoparticle (LNP), wherein the LNP comprise an aggregation reducing lipid, a cationic lipid selected or derived from formula (III), a neutral lipid or phospholipid and a steroid or steroid analog for use in treatment or prevention of an ophthalmic disease, disorder or condition, wherein said composition is administered via intravitreal administration to a subject in need thereof.
[1159] 163b. The pharmaceutical composition comprising at least one mRNA encoding a therapeutic protein, formulated in a lipid nanoparticle (LNP) for use in treatment or prevention of an ophthalmic disease of item 163a, wherein the LNP is further characterized by items 140 to 148.
[1160] 164. A Kit or kit of parts comprising at least one artificial nucleic acid of any one of items 1 to 123, and/or at least one pharmaceutical composition of any one of items 124 to 163, optionally comprising a liquid vehicle for solubilising, and optionally comprising technical instructions providing information on administration and dosage of the components.
[1161] 165. An artificial nucleic acid of any one of items 1 to 123, or a pharmaceutical composition of any one of items 124 to 163, or a kit or kit of parts of item 164, for use as a medicament in treating or preventing a disease, disorder, or condition in a subject.
[1162] 166. An artificial nucleic acid of any one of items 1 to 123, or a pharmaceutical composition of any one of items 124 to 163, or a kit or kit of parts of item 164, for use as a medicament in treating or preventing an ocular disease, disorder, or condition in a subject.
[1163] 167. The artificial nucleic acid of any one of items 1 to 123, or the pharmaceutical composition of any one of items 124 to 163, or the kit or kit of parts of item 164, for use as a medicament of item 165 or 166, wherein the disease, disorder, or condition is associated with or caused by an overexpressed and/or an overactive transcription factor including aging.
[1164] 168. The artificial nucleic acid of any one of items 1 to 123, or the pharmaceutical composition of any one of items 124 to 163, or the kit or kit of parts of item 164, for use as a medicament of item 165 to 166, wherein the disease, disorder, or condition is associated with or caused by pathological epithelial to mesenchymal transition (EMT), pathological cell proliferation, aberrant angiogenesis, aberrant neovascularization, degeneration, fibrosis and/or solid tumors.
[1165] 169. The artificial nucleic acid of any one of items 1 to 123, or the pharmaceutical composition of any one of items 124 to 163, or the kit or kit of parts of item 164 for use as a medicament of item 165 to 166, wherein the ocular disease, disorder, or condition is associated with or caused by aberrant proliferation or migration of retinal pigment epithelial (RPE) cells in a subject.
[1166] 170. The artificial nucleic acid of any one of items 1 to 123, or the pharmaceutical composition of any one of items 124 to 163, or the kit or kit of parts of item 164 for use as a medicament of item 165 to 166, wherein the ocular disease, disorder, or condition is selected from proliferative diabetic retinopathy (PDR), macular edema, non-proliferative diabetic retinopathy, age-related macular degeneration, geographic atrophy, ocular neovascularization, retinopathy of prematurity (ROP), a retinal vein occlusion, ocular ischemic syndrome, neovascular glaucoma, a retinal hemangioma, Coats' disease, FEVR, or Norrie disease, persistent hyperplastic primary vitreous (PHPV), thyroid eye disease, epiretinal membrane, small vessel disease or proliferative vitreoretinopathy (PVR).
[1167] 171. The artificial nucleic acid of any one of items 1 to 123, or the pharmaceutical composition of any one of items 124 to 163, or the kit or kit of parts of item 164 for use as a medicament of item 165 to 166, wherein the ocular disease, disorder, or condition is PVR, preferably the prevention of PVR.
[1168] 172. The artificial nucleic acid of any one of items 1 to 123, or the pharmaceutical composition of any one of items 124 to 163, or the kit or kit of parts of item 164 for use as a medicament of item 171, wherein cell proliferation and/or cell growth is reduced in eyes with PVR.
[1169] 173. The artificial nucleic acid of any one of items 1 to 123, or the pharmaceutical composition of any one of items 124 to 163, or the kit or kit of parts of item 164 for use as a medicament of item 165 to 172, wherein the subject has suffered a trauma to the eye, comprises a retinal hole, a retinal tear, a retinal detachment disorder, or has undergone an ocular surgery.
[1170] 174. The artificial nucleic acid of any one of items 1 to 123, or the pharmaceutical composition of any one of items 124 to 163, or the kit or kit of parts of item 164 for use as a medicament of item 173, wherein the retinal detachment disorder is selected from rhegmatogenous retinal detachment, exudative retinal detachment, or tractional retinal detachment.
[1171] 175. The artificial nucleic acid of any one of items 1 to 123, or the pharmaceutical composition of any one of items 124 to 163, or the kit or kit of parts of item 164 for use as a medicament of item 165 to 174, wherein the use comprises administration of the artificial nucleic acid, the pharmaceutical composition, or the kit or kit of parts by local administration, preferably by ocular administration.
[1172] 176. The artificial nucleic acid of any one of items 1 to 123, or the pharmaceutical composition of any one of items 124 to 163, or the kit or kit of parts of item 164 for use as a medicament of item 165 to 175, wherein the use comprises administration of the artificial nucleic acid, the pharmaceutical composition, or the kit or kit of parts by intravitreal administration, by administration prior to an ocular surgery, during an ocular surgery, or after an ocular surgery.
[1173] 177. The artificial nucleic acid of any one of items 1 to 123, or the pharmaceutical composition of any one of items 124 to 163, or the kit or kit of parts of item 164 for use as a medicament of item 165 to 176, wherein the disease, disorder, or condition is associated with or caused by overexpressed and/or overactive RUNX, preferably RUNX1.
[1174] 178. A method of treating or preventing a disease, disorder or condition, wherein the method comprises applying or administering to a subject in need thereof an effective amount of the artificial nucleic acid of any one of items 1 to 123, or the pharmaceutical composition of any one of items 124 to 163, or the kit or kit of parts of item 164.
[1175] 179. The method of treating or preventing a disease, disorder or condition of item 178, wherein the disease, disorder, or condition is an ocular disease, disorder, or condition.
[1176] 180. The method of treating or preventing a disease, disorder or condition of item 178 or 179, wherein the disease, disorder, or condition is associated with or caused by an overexpressed and/or an overactive transcription factor.
[1177] 181. The method of treating or preventing a disease, disorder or condition of item 177 to 179, wherein the disease, disorder, or condition associated with or caused by pathological epithelial to mesenchymal transition (EMT), pathological cell proliferation, aberrant angiogenesis, aberrant neovascularization, degeneration, solid tumors, and/or fibrosis.
[1178] 182. The method of treating or preventing a disease, disorder or condition of items 178 to 181, wherein the ocular disease, disorder, or condition is associated with or caused by aberrant proliferation or migration of retinal pigment epithelial (RPE) cells in a subject.
[1179] 183. The method of treating or preventing a disease, disorder or condition of items 178 to 182, wherein the ocular disease, disorder, or condition is selected from proliferative diabetic retinopathy (PDR), macular edema, non-proliferative diabetic retinopathy, age-related macular degeneration, geographic atrophy, ocular neovascularization, retinopathy of prematurity (ROP), a retinal vein occlusion, ocular ischemic syndrome, neovascular glaucoma, a retinal hemangioma, Coats' disease, FEVR, or Norrie disease, persistent hyperplastic primary vitreous (PHPV), thyroid eye disease, epiretinal membrane, small vessel disease, or proliferative vitreoretinopathy (PVR).
[1180] 184. The method of treating or preventing a disease, disorder or condition of items 178 to 183, wherein the ocular disease, disorder, or condition is PVR, preferably the prevention of PVR.
[1181] 185. The method of treating or preventing a disease, disorder or condition of items 184, wherein cell proliferation and/or cell growth is reduced in eyes with PVR.
[1182] 186. The method of treating or preventing a disease, disorder or condition of items 178 to 185, wherein the subject has suffered a trauma to the eye, comprises a retinal hole, a retinal tear, a retinal detachment disorder, or has undergone an ocular surgery.
[1183] 187. The method of treating or preventing a disease, disorder or condition of items 186, wherein the retinal detachment disorder is selected from rhegmatogenous retinal detachment, exudative retinal detachment, or tractional retinal detachment.
[1184] 188. The method of treating or preventing a disease, disorder or condition of items 178 to 187, wherein the applying or administering is performed more than once, for example two times, three times, or four times, for example periodically.
[1185] 189. The method of treating or preventing a disease, disorder or condition of items 178 to 188, wherein the applying or administering is performed by local administration, preferably by ocular administration.
[1186] 190. The method of treating or preventing a disease, disorder or condition of items 178 to 189, wherein the applying or administering is performed by intravitreal administration, by administration prior to an ocular surgery, during an ocular surgery, and/or after an ocular surgery.
[1187] 191. The method of treating or preventing a disease, disorder or condition of items 178 to 190, wherein the disease, disorder, or condition is associated with or caused by overexpressed and/or overactive RUNX, preferably RUNX1.
[1188] 192. A method of treating or preventing or preventing an ocular disease in a subject comprising, administering to the subject an effective amount of a composition comprising an artificial nucleic acid comprising at least one coding sequence encoding the RUNX inhibitor, the RUNX inhibitor comprising:
   [1189] at least one amino acid element A selected or derived from CBFbeta configured to bind to the target transcription factor RUNX in the cytosol, preferably wherein element A is further characterized by any of items 22 to 30; and
   [1190] at least one amino acid element B selected or derived from SMMHC configured to trap the target transcription factor RUNX in the cytosol, preferably wherein element B is further characterized by any of items 37 to 52.
[1191] 193. The method of item 192, wherein the composition is administered by ocular administration.
[1192] 194. The method of item 193, wherein the ocular administration is selected from intravitreal or intraoperative administration.
[1193] 195. The method of items 192 to 194, wherein the artificial nucleic acid is an RNA, preferably an mRNA as defined by any of items 110 to 123.
[1194] 196. The method of items 192 to 194, wherein the artificial nucleic acid is comprised in a viral vector, preferably an AAV vector.
[1195] 197. The method of items 192 to 196, wherein the artificial nucleic acid is formulated in lipid-based carriers, preferably as defined by any of items 132 to 146.
[1196] 198. The method of items 192 to 197, wherein the ocular disease is associated with or caused by overexpressed RUNX and/or overactive RUNX, preferably, wherein the ocular disease is PVR.
[1197] 199. A method of reducing the activity of a transcription factor in a cell or a subject, wherein the method comprises
   [1198] a) applying or administering an artificial nucleic acid comprising at least one coding sequence encoding at least one transcription factor inhibitor of items 1 to 123; or
   [1199] b) applying or administering a pharmaceutical composition comprising the artificial nucleic acid comprising at least one coding sequence encoding at least one transcription factor inhibitor of items 124 to 157;
   [1200] to a cell, tissue, or subject, wherein the transcription factor inhibitor is produced in the cell, tissue, or subject after administration or application to said cell, tissue, or subject.
[1201] 200. The method of item 199, wherein the transcription factor inhibitor is a transcription factor trap.
[1202] 201. The method of item 199 or 200, wherein
   [1203] the produced transcription factor inhibitor is a dominant negative inhibitor of the target transcription factor;
   [1204] and/or
   [1205] the produced transcription factor inhibitor binds to the target transcription factor or binds to at least one transcription co-factor of the target transcription factor; and/or
   [1206] the produced transcription factor inhibitor reduces or prevents interaction of a target transcription factor with its target DNA; and/or
   [1207] the produced transcription factor inhibitor reduces or prevents interaction of a target transcription factor with at least one of its transcription co-factors; and/or
   [1208] the produced transcription factor inhibitor reduces or prevents nuclear translocation of a target transcription factor; and/or
   [1209] the produced transcription factor inhibitor or transcription factor trap reduces the activity of a target transcription factor; and/or
   [1210] the produced transcription factor inhibitor or transcription factor trap reduces the cellular expression of a target transcription factor; and/or
   [1211] the produced transcription factor inhibitor or transcription factor trap reduces the cellular expression of proteins that are controlled or regulated by a target transcription factor; and/or
   [1212] the produced transcription factor inhibitor or transcription factor trap triggers plasma membrane anchoring of transcription factors.
[1213] 202. The method of items 199 to 201, wherein the produced transcription factor inhibitor is a RUNX inhibitor or a RUNX trap and the target transcription factor is RUNX.
[1214] 203. The method of items 202, wherein the produced RUNX inhibitor or RUNX trap
   [1215] sequesters cellular RUNX by binding to RUNX in the cytosol or sequesters cellular CBFbeta by binding to CBFbeta in the nucleus
   [1216] reduces or prevents the interaction of cellular RUNX with cellular CBFbeta; and/or
   [1217] reduces cellular RUNX-CBFbeta complex formation and/or activity; and/or
   [1218] reduces the cellular expression of RUNX controlled or regulated gene products; and/or
   [1219] reduces the cellular expression of TGFbeta2, SMAD3, and/or COL1A1; and/or
   [1220] reduces the cellular expression of RUNX; and/or
   [1221] reduces or prevents pathological epithelial to mesenchymal transition (EMT), pathological cell proliferation, aberrant angiogenesis, aberrant neovascularization, degeneration, and/or fibrosis; and/or
   [1222] reduces or prevents cell proliferation and/or cell growth in eyes with PVR.
[1223] 204. The method of item 200 to 203, wherein an ocular administration leads to a production of the transcription factor inhibitor in cells and/or tissues of the eye, preferably in retinal pigment epithelial (RPE) cells.
[1224] 205. The method of items 200 to 203, wherein the reduction of the activity of a transcription factor is a transient reduction of the activity of a transcription factor.
[1225] 206. The method of items 200 to 205, wherein the transcription factor inhibitor is a dominant negative inhibitor of the target transcription factor.

### Preferred Item List

[1226] Particularly preferred embodiments of the present invention are provided in the following item list:
[1227] 1: An artificial RNA comprising at least one coding sequence encoding at least one RUNX inhibitor comprising
   [1228] (i) at least one amino acid sequence element A that is configured to bind a RUNX target transcription factor; and
   [1229] (ii) at least one amino acid sequence element B that is configured to prevent or reduce the interaction of the target transcription factor with its target DNA, wherein the RNA comprises at least one heterologous untranslated region (UTR).
[1230] 2: The artificial RNA of item 1, wherein the at least one amino acid sequence element A comprises or consists of an amino acid sequence selected or derived from a transcription co-factor of RUNX, or a fragment or variant thereof.
[1231] 3: The artificial RNA of item 2, wherein the transcription co-factor of RUNX is selected or derived from CBFbeta, for example CBFbeta1 or CBFbeta2, or a fragment or variant thereof.
[1232] 4: The artificial RNA of item 3, wherein the CBFbeta amino acid sequence is an N-terminal fragment of a human CBFbeta, preferably a fragment comprising amino acid 1 to amino acid 141 of CBFbeta, more preferably a fragment comprising amino acid 1 to amino acid 162 of CBFbeta.
[1233] 5: The artificial RNA of any one of the preceding items, wherein the RUNX inhibitor comprises at least one amino acid sequence element A that comprises or consists of an amino acid sequence selected or derived from CBFbeta being identical or at least 70%, 80%, 85%, 86%, 87%, 88%, 89%, 90%, 91%, 92%, 93%, 94%, 95%, 96%, 97%, 98%, or 99% identical to any one of SEQ ID NOs: 178-183, or fragments or variants of any of these.
[1234] 6: The artificial RNA of any one of the preceding items, wherein the amino acid sequence element B is configured to bind or trap the RUNX target transcription factor in the cytosol.
[1235] 7: The artificial RNA of any one of the preceding items, wherein the at least one amino acid sequence element B comprises or consists of an amino acid sequence selected or derived from a cytoplasmic protein, a protein that is associated with or binds to a cytoplasmic protein, or a fragment or variant thereof.
[1236] 8: The artificial RNA of any one of the preceding items, wherein the amino acid sequence element B is selected or derived from a protein that comprises a myofibrillar binding domain (e.g. actin), a microtubule binding domain, or an intermediate filament binding domain.
[1237] 9: The artificial RNA of any one of the preceding items, wherein the amino acid sequence element B is selected or derived from a protein that comprises an actin binding domain
[1238] 10: The artificial RNA of any one of the preceding items, wherein the amino acid sequence element B is selected or derived from a smooth muscle myosin heavy chain (SMMHC), or a fragment or variant thereof.
[1239] 11: The artificial RNA of any item 10, wherein the SMMHC amino acid sequence is a C-terminal fragment of a human SMMHC, for example an SMMHC fragment comprising amino acid 1527 to amino acid 1972.
[1240] 12: The artificial RNA of item 10 or 11, wherein the SMMHC amino acid sequence comprises a deletion in the C-terminus of about 95aa (SMMHCAC95), for example an SMMHC fragment comprising amino acid 1527 to amino acid 1877.
[1241] 13: The artificial RNA of any one of the preceding items, wherein RUNX inhibitor comprises at least one amino acid sequence element B that comprises or consists of an amino acid sequence being identical or at least 70%, 80%, 85%, 86%, 87%, 88%, 89%, 90%, 91%, 92%, 93%, 94%, 95%, 96%, 97%, 98%, or 99% identical to any one of SEQ ID NOs: 184-193, 1521, 1522, or fragments or variants of any of these.
[1242] 14: The artificial RNA of any one of the preceding items, wherein the RUNX inhibitor comprises or consists of a fusion protein comprising a CBFbeta amino acid sequence element and an SMMHC amino acid sequence element.
[1243] 15: The artificial RNA of any one of the preceding items, wherein the RUNX inhibitor comprises or consists of an amino acid sequence being identical or at least 70%, 80%, 85%, 86%, 87%, 88%, 89%, 90%, 91%, 92%, 93%, 94%, 95%, 96%, 97%, 98%, or 99% identical to any one of SEQ ID NOs: 231-233, 1541-1548, or fragments or variants of any of these.
[1244] 16: The artificial RNA of any one of the preceding items, wherein the RUNX inhibitor comprises or consists of an amino acid sequence being identical or at least 70%, 80%, 85%, 86%, 87%, 88%, 89%, 90%, 91%, 92%, 93%, 94%, 95%, 96%, 97%, 98%, or 99% identical to SEQ ID NO: 232, or a fragment or variant thereof.
[1245] 17: The artificial RNA of any one of the preceding items, wherein the RUNX inhibitor is a RUNX trap, preferably wherein the RUNX trap sequesters cellular RUNX by binding to RUNX in the cytosol and/or trapping RUNX in the cytosol
[1246] 18: The artificial RNA of any one of the preceding items, wherein the RUNX inhibitor, preferably the RUNX trap, reduces cellular RUNX-CBFbeta complex formation and/or activity.
[1247] 19: The artificial RNA of any one of the preceding items, wherein the at least one coding sequence is a G/C optimized coding sequence
[1248] 20: The artificial RNA of any one of the preceding items, wherein the at least one coding sequence comprises or consists of a nucleic acid sequence encoding a RUNX inhibitor, preferably a RUNX trap, that is identical or at least 70%, 80%, 85%, 86%, 87%, 88%, 89%, 90%, 91%, 92%, 93%, 94%, 95%, 96%, 97%, 98%, or 99% identical to any one of SEQ ID NOs: 293-295, 355-357, 417-419, 479-481, 541-543, 603-605, 665-667, 727-729, 789-791, 1549-1558, or a fragment or a variant of any of these.
[1249] 21: The artificial RNA of item 20, wherein the at least one coding sequence comprises or consists of a nucleic acid sequence identical or at least 70%, 80%, 90%, 91%, 92%, 93%, 94%, 95%, 96%, 97%, 98%, or 99% identical to SEQ ID NO: 418, or a fragment or a variant thereof.
[1250] 22: The artificial RNA of any one of the preceding items, wherein the at least one heterologous untranslated region (UTR) is selected from at least one heterologous 5′-UTR and/or at least one heterologous 3′-UTR.
[1251] 23: The artificial RNA of item 22, wherein the at least one heterologous 5′-UTR is selected from HSD17B4 and the at least one heterologous 3′ UTR is selected from PSMB3.
[1252] 24: The artificial RNA of any one of the preceding items, additionally comprising at least one poly(A) sequence, preferably wherein the at least one poly(A) sequence comprises about 60 to about 150 adenosine nucleotides, preferably about 100 adenosine nucleotides.
[1253] 25: The artificial RNA of any one of the preceding items, wherein the RNA is an isolated RNA.
[1254] 26: The artificial RNA of any one of the preceding items, wherein the RNA is selected from mRNA, circular RNA, replicon RNA, or viral RNA, preferably an mRNA
[1255] 27: The artificial RNA of any one of the preceding items, wherein the RNA comprises or consists of a nucleic acid sequence which is identical or at least 70%, 80%, 85%, 86%, 87%, 88%, 89%, 90%, 91%, 92%, 93%, 94%, 95%, 96%, 97%, 98%, or 99% identical to a nucleic acid sequence selected from SEQ ID NOs: 799-801, 809-811, 819-821, 829-831, 839-841, 849-851, 859-861, 869-871, 879-881, 889-891, 899-901, 909-911, 919-921, 929-931, 939-941, 949-951, 959-961, 969-971, 979-981, 989-991, 999-1001, 1009-1011, 1019-1021, 1029-1031, 1039-1041, 1049-1051, 1059-1061, 1069-1071, 1079-1081, 1089-1091, 1099-1101, 1109-1111, 1119-1121, 1129-1131, 1139-1141, 1149-1151, 1159-1161, 1169-1171, 1179-1181, 1189-1191, 1199-1201, 1209-1211, 1219-1221, 1229-1231, 1239-1241, 1249-1251, 1259-1261, 1269-1271, 1279-1281, 1289-1291, 1299-1301, 1309-1311, 1319-1321, 1329-1331, 1339-1341, 1349-1351, 1359-1361, 1369-1371, 1379-1381, 1389-1391, 1399-1401, 1409-1411, 1419-1421, 1429-1431, 1439-1441, 1449-1451, 1459-1461, 1469-1471, 1479-1481, 1489-1491, 1499-1501, 1509-1511, 1559-1582, or a fragment or variant of any of these sequences.
[1256] 28: The artificial RNA of any one of the preceding items, wherein the RNA comprises or consists of a nucleic acid sequence which is identical or at least 70%, 80%, 85%, 86%, 87%, 88%, 89%, 90%, 91%, 92%, 93%, 94%, 95%, 96%, 97%, 98%, or 99% identical to a nucleic acid sequence selected from SEQ ID NOs: 800, 810, 820, 830, 840, 850, 860, 870, 880, 890, 900, 910, 920, 930, 940, 950, 960, 970, 1567, 1568, 1577, 1578-1582, 980, 990, 1000, 1010, 1020, 1030, 1040, 1050, 1060, 1070, 1080, 1090, 1100, 1110, 1120, 1130, 1140, 1150, 1160, 1170, 1180, 1190, 1200, 1210, 1220, 1230, 1240, 1250, 1260, 1270, 1280, 1290, 1300, 1310, 1320, 1330, 1340, 1350, 1360, 1370, 1380, 1390, 1400, 1410, 1420, 1430, 1440, 1450, 1460, 1470, 1480, 1490, 1500, 1510, or a fragment or variant of any of these sequences.
[1257] 29: The artificial RNA of any one of the preceding items, wherein the nucleic acid, preferably the RNA, comprises or consists of a nucleic acid sequence which is identical or at least 70%, 80%, 90%, 91%, 92%, 93%, 94%, 95%, 96%, 97%, 98%, or 99% identical to a nucleic acid sequence selected from SEQ ID NOs: 820, 1579, 1581, 910, 1580, 1582, or a fragment or variant of that sequence.
[1258] 30: The artificial RNA of any one of the preceding items, wherein the RNA comprises at least one modified nucleotide, preferably selected from pseudouridine (w) or N1-methylpseudouridine (m1w).
[1259] 31: The artificial RNA of any one of the preceding items, wherein the RNA comprises or consists of an N1-methylpseudouridine (m1w) or pseudouridine (w) modified nucleic acid sequence which is identical or at least 70%, 80%, 90%, 91%, 92%, 93%, 94%, 95%, 96%, 97%, 98%, or 99% identical to a nucleic acid sequence selected from SEQ ID NOs: 1579-1582, or a fragment or variant of that sequence.
[1260] 32: The artificial RNA of item 31, wherein the RNA comprises or consists of an N1-methylpseudouridine (m1w) modified nucleic acid sequence which is identical or at least 70%, 80%, 90%, 91%, 92%, 93%, 94%, 95%, 96%, 97%, 98%, or 99% identical to a nucleic acid sequence selected from SEQ ID NOs: 1580 or 1579, or a fragment or variant of that sequence.
[1261] 33: The artificial RNA of any one of the preceding items, wherein the RNA is an mRNA that comprises a 5′-cap structure, preferably a 5′-cap1 structure.
[1262] 34: A pharmaceutical composition comprising at least one artificial RNA comprising at least one coding sequence encoding at least one RUNX inhibitor as defined in any one of the items 1 to 33.
[1263] 35: The pharmaceutical composition of item 34, wherein the at least one artificial RNA is formulated in at least one cationic or polycationic compound preferably selected from a cationic or polycationic polymer, a cationic or polycationic polysaccharide, a cationic or polycationic lipid, a cationic or polycationic protein, a cationic or polycationic peptide, or any combinations thereof.
[1264] 36: The pharmaceutical composition of items 34 or 35, wherein the at least one artificial RNA is formulated in lipid-based carriers preferably selected from liposomes, lipid nanoparticles, lipoplexes, solid lipid nanoparticles, lipo-polylexes, and/or nanoliposomes.
[1265] 37: The pharmaceutical composition of item 36, wherein the lipid-based carriers are lipid nanoparticles, preferably wherein the lipid nanoparticles encapsulate the artificial RNA.
[1266] 38: The pharmaceutical composition of items 36 or 37, wherein the lipid-based carriers comprise at least one lipid selected from an aggregation-reducing lipid, at least one lipid selected from a cationic lipid or ionizable lipid, at least one lipid selected from a neutral lipid or phospholipid, and at least one lipid selected from or a steroid or steroid analog.
[1267] 39: The pharmaceutical composition of item 38, wherein the lipid-based carriers comprise an aggregation reducing lipid selected from a polymer conjugated lipid.
[1268] 40: The pharmaceutical composition of item 38 or 39, wherein the aggregation reducing lipid is a polymer conjugated lipid selected or derived from DMG-PEG 2000, C10-PEG2K, Cer8-PEG2K, a POZ-lipid, or ALC-0159
[1269] 41: The pharmaceutical composition of items 38 to 40, wherein the at least one cationic lipid or ionizable lipid is selected from an amino lipid, preferably wherein the amino lipid comprises a tertiary amine group.
[1270] 42: The pharmaceutical composition of items 38 to 41, wherein the at least one cationic or Ionizable lipid is a lipid selected or derived from formula (III-1).
[1271] 43: The pharmaceutical composition of items 38 to 42, wherein the at least one cationic or ionizable lipid is selected or derived from a lipid according to formula III-3.
[1272] 44: The pharmaceutical composition of items 38 to 43, wherein the lipid-based carriers comprise a cationic lipid selected or derived from ALC-0315, SM-102, SS-33/4PE-15, HEXA-C5DE-PipSS, or compound C26.
[1273] 45: The pharmaceutical composition of items 38 to 44, wherein the lipid-based carriers comprise a neutral lipid selected or derived from DSPC, DHPC, or DphyPE.
[1274] 46: The pharmaceutical composition of items 38 to 45, wherein the lipid-based carriers comprise a steroid or steroid analog selected or derived from cholesterol, cholesteryl hemisuccinate (CHEMS), preferably cholesterol.
[1275] 47: The pharmaceutical composition of items 38 to 46, wherein the lipid-based carriers comprise
   [1276] (i) at least one cationic lipid, preferably as defined in item 41 to 44;
   [1277] (ii) at least one neutral lipid, preferably as defined in item 45;
   [1278] (iii) at least one steroid or steroid analogue, preferably as defined in item 46; and
   [1279] (iv) at least one aggregation reducing lipid, preferably as defined in item 39 or 40.
[1280] 48: The pharmaceutical composition of items 38 to 47, wherein the lipid-based carriers comprise
   [1281] (i) at least one cationic lipid selected from ALC-0315;
   [1282] (ii) at least one neutral lipid selected from DSPC;
   [1283] (iii) at least one steroid or steroid analogue selected from cholesterol; and
   [1284] (iv) at least one aggregation reducing lipid selected from ALC-0159.
[1285] 49: The pharmaceutical composition of items 38 to 48, wherein the lipid-based carriers comprise about 20-60% cationic lipid, about 5-25% neutral lipid, about 25-55% steroid or steroid analogue, and about 0.5-15% aggregation reducing lipid.
[1286] 50: The pharmaceutical composition of items 38 to 49, wherein the wt/wt ratio of lipid to nucleic acid in the lipid-based carrier is from about 10:1 to about 60:1, preferably from about 20:1 to about 30:1.
[1287] 51: The pharmaceutical composition of items 38 to 50, wherein the N/P ratio of the lipid-based carriers encapsulating the nucleic acid is in a range from about 1 to about 10, preferably in a range from about 5 to about 7.
[1288] 52: The pharmaceutical composition of items 38 to 51, wherein the lipid-based carriers have a Z-average size in a range of about 50 nm to about 120 nm.
[1289] 53: The pharmaceutical composition or the artificial RNA of any one of the preceding items, wherein administration of the pharmaceutical composition or artificial RNA reduces or prevents pathological epithelial to mesenchymal transition (EMT), pathological cell proliferation, aberrant angiogenesis, aberrant neovascularization, degeneration, and/or ocular fibrosis.
[1290] 54: The pharmaceutical composition or the artificial RNA of item 53, wherein the administration is an ocular administration preferably selected from topical, intravitreal, intracameral, intranasal, subconjunctival, subretinal, subtenon, orbital, retrobulbar, topical, suprachoroidal, posterior juxtascleral, or intraoperative administration, preferably intravitreal or intraoperative administration.
[1291] 55: The pharmaceutical composition or the artificial RNA of item 55, wherein the ocular administration is performed into a tamponade agent-filled human eye, optionally wherein the tamponade agent is a gas agent or a silicone agent.
[1292] 56: A Kit or kit of parts comprising at least one artificial RNA of any one of items 1 to 33, and/or at least one pharmaceutical composition of any one of items 34 to 55, optionally comprising a liquid vehicle for solubilising, and optionally comprising technical instructions providing information on administration and dosage of the components.
[1293] 57: An artificial RNA of any one of items 1 to 33, or a pharmaceutical composition of any one of items 34 to 55, or a kit or kit of parts of item 56, for use as a medicament in treating or preventing a disease, disorder, or condition in a subject.
[1294] 58: An artificial RNA of any one of items 1 to 33, or a pharmaceutical composition of any one of items 34 to 55, or a kit or kit of parts of item 56, for use as a medicament in treating or preventing an ocular disease, disorder, or condition in a subject.
[1295] 59: An artificial RNA of any one of items 1 to 33, or a pharmaceutical composition of any one of items 34 to 55, or the kit or kit of parts of item 56, for use as a medicament of item 57 or 58, wherein the disease, disorder, or condition is associated with or caused by pathological epithelial to mesenchymal transition (EMT), pathological cell proliferation, aberrant angiogenesis, aging, aberrant neovascularization, degeneration, solid tumors, and/or fibrosis.
[1296] 60: An artificial RNA of any one of items 1 to 33, or a pharmaceutical composition of any one of items 34 to 55, or the kit or kit of parts of item 56 for use as a medicament of item 58 or 59, wherein the ocular disease, disorder, or condition is selected from proliferative diabetic retinopathy (PDR), macular edema, non-proliferative diabetic retinopathy, age-related macular degeneration, geographic atrophy, ocular neovascularization, retinopathy of prematurity (ROP), a retinal vein occlusion, ocular ischemic syndrome, neovascular glaucoma, a retinal hemangioma, Coats' disease, FEVR, or Norrie disease, persistent hyperplastic primary vitreous (PHPV), thyroid eye disease, epiretinal membrane, small vessel disease, or proliferative vitreoretinopathy (PVR), preferably wherein the ocular disease, disorder, or condition is PVR.
[1297] 61: An artificial RNA of any one of items 1 to 33, or the pharmaceutical composition of any one of items 34 to 55, or the kit or kit of parts of item 56 for use as a medicament in treating or preventing proliferative vitreoretinopathy (PVR).
[1298] 62: An artificial RNA of any one of items 1 to 33, or the pharmaceutical composition of any one of items 34 to 55, or the kit or kit of parts of item 56 for use as a medicament of items 58 to 61, wherein the subject has suffered a trauma to the eye, comprises a retinal hole, a retinal tear, a retinal detachment disorder, or has undergone an ocular surgery, preferably wherein the retinal detachment disorder is selected from rhegmatogenous retinal detachment, exudative retinal detachment, or tractional retinal detachment.
[1299] 63: An artificial RNA of any one of items 1 to 33, or the pharmaceutical composition of any one of items 34 to 55, or the kit or kit of parts of item 56 for use as a medicament of items 58 to 62, wherein the use comprises administration of the artificial RNA, the pharmaceutical composition, or the kit or kit of parts by intravitreal administration, by administration prior to an ocular surgery, during an ocular surgery, or after an ocular surgery.
[1300] 64: A method of treating or preventing a disease, disorder or condition, wherein the method comprises applying or administering to a subject in need thereof an effective amount of the artificial RNA of any one of items 1 to 33, or the pharmaceutical composition of any one of items 34 to 55, or the kit or kit of parts of item 56, preferably further characterized by any of the features of items 57 to 63.

### Brief Description of Tables:

[1301] Table 1: Element A and B of the transcription factor inhibitors (amino acid sequences and cds)
[1302] Table 2: Transcription factor inhibitor fusion constructs (amino acid sequences and cds)
[1303] Table 3: RNA sequences encoding transcription factor inhibitors
[1304] Table 4: RNA sequences encoding the preferred RUNX inhibitor according to SEQ ID NO: 232
[1305] 5 Table 5: RNA constructs used in the examples
[1306] Table 6: Summary of primary and secondary antibody dilutions used in examples
[1307] Table 7: RUNX trap variant constructs used in Example 7.
[1308] Table 8: LNP formulations and RUNX trap constructs used in Example 8
[1309] Table 9: Different opt1-optimized mRNAs encoding RUNX trap used in Example 9
[1310] 10 Table 10: RUNX trap formulations used in Example 10
[1311] Table 11: Study groups used in Example 12
[1312] List A: Suitable target transcription factors
[1313] List B: Suitable cytoskeletal proteins that may be used for element B

### BRIEF DESCRIPTION OF THE FIGURES

[1314] FIG. 1: Merely as an illustration, the proposed mechanism of a nucleic acid encoded transcription factor inhibitor, in that example, a RUNX trap is shown. Nucleic acid delivery in a delivery vehicle (e.g. lipid-based carrier) and the mechanism of action of the produced RUNX trap is shown. The produced RUNX trap prevents entry of the cellular target transcription factor into the nucleus by binding to RUNX, thereby, inter alia suppressing the activity of RUNX.

[1315] FIG. 2: Primary cultures from human PVR contain cells representative of the EMT continuum. 2A: Cell clustering analysis was done according to the cell cycle phase. The UMAP identified 3 distinguishable clusters. 2B and 2C: Genes classified under epithelial marker category were enriched in Cluster 2 whereas genes classified under mesenchymal marker category were enriched in Cluster 0. Further information is provided in the Example section, Example 3.

[1316] FIG. 3: shows that mRNA-encoded RUNX trap sequestered RUNX1 in the cytoplasm and reduced proliferation of C-PVRs in vitro. 3A: Fluorescence microscopy shows expression of GFP in C-PVR cells with CVCM1 and CVCM2 or negative control (NC). 3B: Expression of the RUNX trap in C-PVR cells by Western blot. 3C: Immunocytochemistry showing expression and localization of the RUNX trap (white), N-Cadherin, RUNX1 and DAPI in C-PVR (Scale bar—50 μm). 3D: Western blot and immunocytochemistry. 3E: shows the effects of nucleic acid encoded RUNX trap treatment on TGFbeta2-mediated induction of N-Cadherin. 3F and 3G: In vitro functional assays show the effect of treatment with RUNX trap in proliferation and cell viability measured by LDH (3H). 3I: Dot plot diagram comparing the expression of SMMHC as the marker for RUNX trap and RUNX1 expression in control vs RUNX1 treatment group. Further information is provided in the Example section, Example 4.

[1317] FIG. 4: shows that mRNA-encoded RUNX trap reduced PVR membrane growth and eye pathology in a rabbit model and reversed EMT in C-PVR. 4A: Significant expression of a mRNA encoded Luciferase reporter at 24 hours within the vitreous of rabbit eyes injected with C-PVR cells. 4B: Timeline of preclinical efficacy of the RUNX trap in a rabbit model of PVR. 4C: Representative H&E images from rabbit eyes treated with RUNX-Trap or control after 2 weeks (Scale Bar—200 μm). 4D: OCT images at 2-weeks comparing eyes treated with the RUNX trap compared to vehicle injected eyes. 4E: PVR severity score and Fastenberg score. 4F: Percentage number of the cells per cluster based on the treatment in the scRNAseq analysis of C-PVR primary culture. 4G: The figure plot showing expression pattern according to the ratio unspliced/spliced molecule counts transcribed from the gene MARVELD2, which is a marker of epithelial cells, and COL4A1, a mesenchymal marker. 4H: Effect of the RUNX1 trap on EMT related genes in C-PVR cells visualized by Dotplot. 4I: Proposed mechanism of RUNX1 regulating EMT in C-PVR primary culture (left) and proposed RUNX trap mechanism. Further information is provided in the Example section, Examples 5 and 6.

[1318] FIG. 5: shows that mRNA-encoded RUNX trap variants 1˜4 (5A-5D) and variant 6 (5E) reduce proliferation of C-PVRs in vitro after 24 h after transfection. NC=Negative control. Further information is provided in the Example section, Example 7.

[1319] FIG. 6: shows that mRNA-encoded RUNX trap variants 1-7 (6A-6G) reduce proliferation of C-PVRs in vitro after 48 h after transfection. NC=Negative control. Further information is provided in the Example section, Example 7.

[1320] FIG. 7: shows the comparison of CBFbeta expression of SM-102 LNP formulated modified (N1-methylpseudouridine (m1ψ) or unmodified mRNA encoding RUNX trap after transfection of ARPE-19 cells. Further information is provided in the Example section, Example 8.

[1321] FIG. 8: shows that ARPE-19 cells transfected with LNP-formulated mRNA encoding RUNX traps display an efficient level of CBFbeta. Further information is provided in the Example section, Example 9.

[1322] FIG. 9: shows that 315 LNP-formulated mRNA encoding RUNX trap reduce proliferation of C-PVRs (9A). 9B shows low levels of IFNalpha for the formulations F5-7. The transfection also does not have an effect cell viability as shown for all formulations in 9C. Levels of cyclin D, a proliferation marker, have been decreased in cells transfected with LNPs carrying mRNAs encoding RUNX traps (9D). Further information is provided in the Example section, Example 10.

[1323] FIG. 10: shows the effect on leakage of LNP-formulated RUNX trap mRNA in a laser-induced choroidal neovascularization (CNV) mice model after 7 days of injection (10A). 10B shows that doses of 25 ng are more effective in reducing lesion size compared to Eylea after 7 days post injection. Further information is provided in the Example section, Example 11.

### EXAMPLES

[1324] In the following, examples illustrating various embodiments and aspects of the invention are presented. However, the present invention shall not to be limited in scope by the specific embodiments presented herein and should rather be understood as being applicable to other compositions or uses as for example defined in the specification. Accordingly, the following preparations and examples are given to enable those skilled in the art to more clearly understand and to practice the present invention. Indeed, various modifications of the invention in addition to those described herein will become readily apparent to those skilled in the art from the foregoing description, accompanying figures and the examples below.

### Example 1: Preparation of Nucleic Acid Formulations Encoding Transcription Factor Inhibitors

[1325] The present example provides methods of obtaining the RNA of the invention as well as methods of generating composition of the invention comprising nucleic acid, in particular RNA formulated in polyethylene glycol/peptide polymers or RNA formulated in lipid-based carriers.

### 1.1. Preparation of DNA Templates for RNA In Vitro Transcription:

[1326] DNA sequences encoding transcription factor inhibitors of the invention were prepared and used for subsequent RNA in vitro transcription reactions. Some DNA sequences were prepared by modifying the wild type or reference encoding DNA sequences by introducing a G/C optimized coding sequence for stabilization and expression optimization. Sequences were introduced into a pUC derived DNA vector to comprise a stabilizing heterologous UTR sequences and a stretch of adenosines and optionally a histone stem-loop (hSL). The obtained plasmid DNA templates were transformed and propagated in bacteria using common protocols known in the art. Eventually, the plasmid DNA templates were extracted, purified, and linearized using a restriction enzyme. The herein used RNA constructs are provided in Table 5.

TABLE 5
RNA constructs used in the Examples

| | | SEQ | SEQ | SEQ |
|---|---|---|---|---|
| | | ID NO: | ID NO: | ID NO: |
| RNA ID | Name | Protein | CDS | RNA |
| R9714 | CBFB(1-165)-SMMHC(1527-1927) | 231 | 355 | 809 |
| R9715 | CBFB(1-165)-SMMHC(1527-1927) | 231 | 417 | 810 |
| R9716 | CBFB(1-165)-SMMHC(1527-1877) | 232 | 356 | 819 |
| | (CBFbeta-SMMHCΔC95) | | | |
| R9717 | CBFB(1-165)-SMMHC(1527-1877) | 232 | 418 | 820 |
| | (CBFbeta-SMMHCΔC95) | | | |
| R11302 | CBFbeta(1-165)-SMMHC(1527-1877) | 232 | 418 | 820 |
| R11315 | CBFB(1-165)-SMMHC(1527-1877) | 232 | 418 | 910 |
| R11316 | CBFbeta(1-165)-SMMHC(1527-1877) | 232 | 418 | 1580 |
| R11350 | CBFB(1-165)-SMMHC(1527-1877) | 232 | 480 | 830 |
| R11352 | CBFB(1-165)-SMMHC(1527-1877) | 232 | 604 | 850 |
| R11353 | CBFbeta(1-165)-SMMHC(1527-1877) | 232 | 418 | 1582 |
| R9744 | CBFbeta(1-165)-Linker-LifeAct | 1548 | 1556 | 1566 |
| R11345 | CBFbeta(1-165)-HIF1alpha(549-575) | 234 | 420 | 822 |
| R11346 | RUNX1(1-177)-RUNX1T1a(31-604) | 236 | 422 | 824 |
| R11349 | RUNX1(K83E,R174Q) | 197 | 383 | 818 |
| R11344 | CBFbeta(1-141)-SMMHC(1527-1877) | 1545 | 1553 | 1563 |
| R7386 | luciferase | | | 1518 |
| R8720 | eGFP | | | 1519 |
| R8730 | luciferase | | | 1520 |

1.2. RNA In Vitro Transcription from Plasmid DNA Templates:

[1327] Linearized DNA templates were used for DNA dependent RNA in vitro transcription (IVT) using T7 RNA polymerase in the presence of a sequence optimized nucleotide mixture (ATP/GTP/CTP/UTP) and cap analog (for Cap1: m7G(5′)ppp(5′)(2′OMeA)pG; TriLink) under suitable buffer conditions. After RNA in vitro transcription, the obtained RNA IVT reaction was subjected to purification steps comprising RP-HPLC.

1.3. Preparation of Polymer-Lipidoid Complexes Carrying mRNA (CVCMs);

[1328] 20 mg of peptide (CGH₅R₄H₅GC-NH₂) was dissolved in N-methylpyrrolidone. After addition of 2 ml of borate buffer (pH 8.5), the solution was stirred at RT for >18 h. Subsequently, 12.6 mg of PEG-SH 5000, dissolved in N-methylpyrrolidone, was added to the peptide solution and the vial filled up to 3 ml with borate buffer (pH 8.5). After 18 h, the reaction mixture was purified and further concentrated using Centricon filter units (MWCO 10 kDa) and subsequently lyophilized. The obtained polyethylene glycol/peptide polymers (HO-PEG 5000-S-(S-CGH₅R₄H₅GC-S-)7-S-PEG 5000-OH), dissolved in water, were used to prepare RNA formulations. RNA was complexed with the polymer at the 1:2 ratio (W/W). Two different 3-C12-C3-OH lipidoid concentrations were used (CVCM® 1 and 2). Formulated RNA was lyophilized and stored at −80° C.

1.4. Preparation of Lipid-Based Carriers Encapsulating the mRNA:

[1329] An ethanolic lipid solution is prepared by solubilizing a cationic lipid, a neutral lipid, cholesterol, and an aggregation reducing lipid in ethanol. An aqueous RNA solution is prepared by adjusting the purified RNA (obtained according to Example 1.2) to a target concentration in 50 mM citrate buffer, pH 4.0.

[1330] Lipid-based carriers are prepared essentially according to the procedures described in WO2015199952, WO2017004143 and WO2017075531. In short, lipid-based carriers are prepared at a ratio of RNA to total Lipid of about 0.03-0.04 w/w. Pumps are used to combine the ethanolic lipid solution with a flow rate F1 and the RNA aqueous solution with a flow rate F2 at a ratio of about 1:5 to 1:3 (vol/vol) in a T-piece system. F1 and/or F2 are adjusted to flow rates above 15 ml/min to allow the formation of LNPs encapsulating the RNA that have a Z-average size in a range from about 50 nm to about 120 nm. After formulation, the ethanol is removed by at least one TFF step and at least one clarifying filtration step. After clarifying filtration, the filtrate is adjusted to a desired concentration (typically 1 g/l RNA) using a buffer comprising sucrose, sodium chloride, and a buffering agent. Subsequently, the resulting formulation is filtered through sterilizing filters to reduce bioburden as used for in vitro and in vivo studies essentially according to Example 2 to Example 6.

[1331] The herein tested 315 LNPs were composed of 40.9 mol % cholesterol, 10 mol % DSPC, 47.4 mol % ALC-0315, and 1.7 mol % ALC-0159 (N: P ratio of 6).

[1332] The herein tested SM-102 LNPs were composed of 38.5 mol % cholesterol, 10 mol % DSPC, 50 mol % SM-102, and 1.5 mol % DMG-PEG 2000 (N: P ratio of 6).

### Example 2: Methods Used in the Experiments

[1333] The present example provides methods used for testing the nucleic acid-based transcription factor inhibitor formulations (obtained according to Example 1).

### 2.1. Western Blotting:

[1334] Protein concentration was calculated using the BCA assay. Subsequently 10 μg of protein was prepared in 10 μl RIPA buffer (Cell Signaling Technology), 4 μl DTT (1 M, Sigma Aldrich) and 10 μl Laemmli buffer (Boston Bioproducts) to a final volume of 40 μl and denatured 5 min at 90° C. Samples were separated electrophoretically for 1 h at 70 V using 4-20% pre cast gradient gels (Mini-PROTEAN TGX, Bio-Rad) and SDS-Tris-Glycine buffer. Proteins were transferred to nitrocellulose membranes (VWR; 27376-991) for 1 h at 70 V. Membranes were blocked for 1 h with Odyssey Blocking Buffer (LI-COR Biosciences), and probed overnight at 4° C. with primary antibody and 1 h at room temperature with IRDye 800CW donkey anti-rabbit (1:10,000, LI-COR Biosciences) antibodies. Immunoreactive bands were visualized using the Odyssey Infrared Imaging System and visualized on the Image Studio version 2.1 (LI-COR Biosciences).

### 2.2. Luciferase Assay:

[1335] Frozen rabbit eyes were dissected and the vitreous and retina were collected and homogenized in lysis buffer, subsequently 20 μl of lysate are added to each well of a 96 well plate and before the plate was read using the Luminometer, 100 μl of luciferase assay reagent was added to each well and the plate was read immediately. Statistical analysis was carried out using a one-way ANOVA with Tukey's multiple comparison correction.

### 2.3. C-PVR Cell Culture:

[1336] Human PVR membranes obtained after the surgery were immediately processed for single cell isolation according to previous published protocol (Delgado-Tirado et al 2020, Scientific Reports. 2020; 10 (1): 20554). C-PVR were seeded with 30×10³/well density in 48 well plates. 24 h after seeding, the cells were treated with the nucleic acid formulation or PVR media alone (control) in triplicates for each condition and incubated for 2 h. The cells were washed with PBS and cultured in PVR media with the growth factors for 24 h then collected for further analysis.

### 2.4. Proliferation and Cell Viability Assays:

[1337] C-PVR cells were cultured and maintained in 96 well plates. Cells were incubated with the formulations for 2 h in serum free media with the formulations. After 2 h, the media was switched to complete media and cells incubated for 24 h. 24 h post treatment, the proliferation rate was measured using CyQUANT Direct Cell Proliferation Assay (ThermoFisher, Waltham, MA) according to the manufacturer's recommendation. The proliferation result was validated using a Ki67 ELISA method (Abcam, ab253221) according to the manufacturer's guidelines. C-PVR cells were cultured in 24 well plate to form a confluent monolayer. Following the proliferation assay, a lactate dehydrogenase (LDH) assay (Promega, G1780) was used to assess toxicity of the formulations according to the manufacturer's guidelines.

### 2.5. PVR Induction in Rabbits and RNA Formulation Administration:

[1338] PVR induction in rabbits was carried out as previously described (see Delgado-Tirado et al 2020, Scientific Reports. 2020; 10 (1): 20554). Briefly, animal experiments were performed in accordance with the guidelines for the Use of Animals in Ophthalmic and Vision Research of the Association for Research in Vision and Ophthalmology (ARVO). This study was also approved by Institutional Animal Care and Use Committee (IACUC) of the Schepens Eye Research Institute of Mass Eye and Ear. Only male New Zealand White rabbits (2.3 kg of weight, 6-8 week-old) purchased from Charles River (Charles River Laboratories, Inc., Wilmington, MA) were used. A PVR score grading system was developed to assess severity of disease as previously published (Delgado-Tirado et al 2020; Scientific Reports. 2020; 10 (1): 20554). The score was determined by combination of the most severe phenotypes identified by indirect ophthalmoscopy, fundus imaging and OCT. OCT, fundus and histology were performed as previously described (Delgado-Tirado et al 2020; Scientific Reports. 2020; 10 (1): 20554).

### 2.6. Immunocytochemistry Protocol:

[1339] C-PVR cells were seeded on glass slides (MatTek), 40,000 cells per well then after 24 h, cells were treated with 5 μg in 500 μl of serum free media and incubated for 2 h, the media was then exchanged with 500 μl growth media and incubated for 24 h at 37° C. Cells were washed with ice cold PBS, then fixed in PFA 4% for 5 min, washed in PBS, then incubated in PB (Permeabilization and Blocking buffer) consisting of 1×PBS, 1% Donkey Serum and 0.05% Triton X overnight. Subsequently, cells were incubated with primary antibody (see Table 6) diluted in blocking buffer overnight at 4° C. Samples were then washed in PBS and incubated with the corresponding secondary antibody for 2 h at room temperature, and nuclei were stained with DAPI (1:1000) for 15 min. Finally, samples were mounted with vectashield mouting media (Vector Laboratories). Images were acquired with a Leica SP8 confocal microscope (Leica, Wetzlar, Germany).

TABLE 6
Summary of primary and secondary antibody dilutions

| Target | Antibody | Company-Cat No. | Dilution |
|---|---|---|---|
| CBFbeta | Sheep Polyclonal | Fischer Scientific (AF73349SP) | 1:200 |
| N-Cadherin | Mouse Monoclonal | Santa Cruz (sc-53488) | 1:500 |
| RUNX1 | Rabbit Polyclonal | Lifespan Bioscience (LSB13948) | 1:500 |

| Secondary Antibody | Company-Cat No. | Dilution |
|---|---|---|
| IRDye 800CW-Anti Mouse | Licor | 1:2000 |
| IRDye 800CW-Anti Rabbit | Licor | 1:2000 |
| Donkey Anti-Goat AlexaFluor 488 | ThermoFisher (A-11057) | 1:200 |
| Donkey Anti- Mouse Alexa Fluor 594 | ThermoFisher (A10037) | 1:200 |
| Donkey Anti-Rabbit AlexaFluor 647 | ThermoFisher (A32795) | 1:200 |

### 2.7. Sample Preparation and Single Cell RNA Sequencing:

[1340] C-PVR cells were treated in culture with 5 μg of RNA encoding for Luciferase or RUNX inhibitor for 24 h prior to cell harvesting. Single cells suspension of C-PVR primary culture was prepared according to the protocol recommended by the 10× Genomics sample preparation guide (CG00053) and scRNAseq was performed using 10× Genomics Chromium Single Cell 3′ Reagent Kits version 2. Size distribution and molarity of resulting cDNA libraries were assessed via Bioanalyzer High Sensitivity DNA Assay (Agilent Technologies, USA). The libraries were then pooled and sequenced on an Illumina NextSeq 500 instrument according to Illumina and 10× Genomics guidelines with 1.4-1.8 pM input and 1% PhiX control library spike-in (Illumina, USA). The data was processed using 10× Genomics' Cell Ranger pipeline, which generates feature/barcode matrices from the raw counts data. The full dataset contained 27,215 features and 7,379 cells. Before clustering, the counts matrix was filtered to only include the top 5,000 variable features. If the dataset was smaller than the specified number of variable genes, all the features were kept for analysis. The final dataset contained 27,215 genes and 6,585 cells. The single cell sequencing data were then analyzed using the open-source Seurat kit with Louvain clustering and visualized by Uniform Manifold Approximation and Projection (UMAP). The cell percentage calculation was done at clustering resolution of 0.2. Differential expression genes analysis was used to identify the cell types and compared each cluster to all others using the Wilcoxon method in Seurat with each retained marker expressed at a minimum log fold change threshold of 0.25 for cluster-specific marker genes identification.

2.8. Identification of C-PVR Cell Types and Transcription Factors Enrichment Analysis of scRNAseq Data:

[1341] Cells were clustered using the recursiveSplitModule and recursiveSplitCellfunctions, testing for different numbers of cell clusters and feature modules. Feature module numbers L were tested from 10 to 150. Since there is no clear “elbow” in the resulting perplexity plot, the selected number of modules was chosen to be L=100. To complete the clustering, the recursiveSplitCell function was applied to the selected celda model with a range of K values from 10 to 40. Differential expression genes analysis was used to identify the cell types and compared each cluster to all others using the Wilcoxon method in Seurat with each retained marker expressed at a minimum log fold change threshold of 0.25 for cluster-specific marker genes identification.

### Example 3: Primary Cultures from Human PVR Contain Cells Representative of the EMT Continuum

[1342] The goal of the experiment was to test whether human primary cell cultures obtained from surgically removed PVR membranes (C-PVRs) can serve as a model for testing the effect of nucleic acid encoded transcription factor inhibitors. Methods used herein are further described in Example 2.

[1343] EMT is a dynamic and continuous biological process that contributes to organogenesis and disease. During EMT, cells fluctuate from extremes of differentiated epithelium to undifferentiated mesenchyme with a multitude of potential phenotypes in between. Single cell RNA sequencing (scRNA-seq) was carried out to characterize the baseline status of EMT within human primary cell cultures obtained from surgically removed PVR membranes (named C-PVRs) (see FIG. 2A). UMAP dimensionality reduction projection plot displays the trajectories of expression of epithelial and mesenchymal markers in C-PVR primary culture (see FIG. 2B). A gradual loss of epithelial markers was observed such in clusters 2>1> and 0, respectively. This correlated with a gain of mesenchymal genes or EMT-associated markers in cluster 0>1> and 2, indicating a shift toward mesenchymal phenotypes in cluster 0 from epithelial phenotypes in cluster 3 (see FIG. 2C).

[1344] The data of the experiment demonstrates that the used C-PVR primary cultures display a continuum of cell clusters undergoing various stages of EMT and can therefore be used as an informative model for testing and developing of nucleic acid-based transcription factor inhibitors.

### Example 4: RNA Encoded RUNX Trap Sequestered RUNX1 in the Cytoplasm and Reduced Proliferation and TGFbeta2-Induced EMT of C-PVRs In Vitro

[1345] The goal of the experiment was to test whether an exemplary nucleic acid encoded transcription factor inhibitor, namely encoding a RUNX inhibitor according to protein SEQ ID NO: 323, displayed the expected cytosolic localization. Further, the effect of the produced a RUNX inhibitor on EMT was explored. RNA formulations used in the experiment were prepared according to Example 1, methods used herein are described in Example 2.

[1346] C-PVR cells (that have been analyzed in Example 3) were treated with 10 μg RNA encoding green fluorescent protein (GFP; RNA SEQ ID NO: 1519) using delivery carriers consisting of a cationic polymer in the core and a polyethylene glycol (PEG) layer on the outside to examine effectiveness and duration of protein production in that specific cell type ((CVCM® 1 and CVCM® 2, generated according to Example 1). The data shows that both tested formulations showed stronger mRNA delivery capabilities which resulted in a strong GFP expression. Cells transfected with both formulations continued to display GFP positive signal at 72 hours (FIG. 3A).

[1347] Accordingly, RNAs encoding for CBFbeta-SMMHC (RUNX trap; RNA sequence SEQ ID NO: 819; RNA sequence SEQ ID NO: 820) were formulated in these polymer-based carrier formulations and used to treat C-PVR. A robust production of CBFbeta-SMMHC was observed upon administration of 10 μg RNA after 24 hours as determined by Western blot (FIG. 3B). Cytosolic localization of CBFbeta-SMMHC and RUNX1 was confirmed by immunocytochemistry and confocal microscopy (FIG. 3C) which was consistent with the proposed sequestering mechanism (illustrated in FIG. 1). As shown in FIG. 3C, the produced RUNX trap CBFbeta-SMMHC co-localized with the target cellular RUNX1 in the cytosol which shows that the produced RUNX trap bound to the target transcription factor to captured RUNX1 in the cytosol. RUNX1 expression was reduced in cells with high levels of CBFbeta-SMMHC.

[1348] Stimulation of C-PVR cells with TGFbeta2 promotes EMT. C-PVR cells were stimulated with TGFbeta2 for 24 hours to assess the effect of the provided RUNX trap in EMT by measuring the expression of the mesenchymal marker N-Cadherin (FIG. 3D). Treatment with the nucleic acid encoding the RUNX trap blunted the ability of TGFbeta2 to induce N-Cadherin expression and reduced cell numbers as shown on confocal images (FIG. 3E).

[1349] A significant reduction in C-PVR proliferation upon treatment with the nucleic acid encoding the RUNX trap was confirmed using CyQuant Direct Cell Proliferation kit and an ELISA for Ki67 proliferation marker (FIG. 3F,G). The results show a clear effect on EMT and proliferation for all tested formulations and RNA constructs. The RNA construct comprising an optimized coding sequence was more efficient (SEQ ID NO: 820). Importantly, the treatments had no significant cellular toxicity measured by the lactate dehydrogenase (LDH) assay FIG. 3H). We directly confirmed the presence of the RNA encoding the RUNX1 trap by scRNA-Seq of C-PVRs after treatment. Dot plots showed that the levels of SMMHC (amino acid element B) was very high in cells treated with the RNA, while RUNX1 expression was significantly reduced compared with controls (FIG. 3I). The data of the experiment prove high RNA delivery efficacy and its translation into the encoded transcription factor inhibitor protein. Moreover, the data demonstrates that sequestering of RUNX1 by the provided RUNX trap further reduces RUNX1 expression, indicating that the produced RUNX trap protein was biologically active. The data is consistent with previous findings of a self-regulatory feedback loop for RUNX1 expression.

### Example 5: RNA-Encoded RUNX Trap Reduced PVR Membrane Growth and Eye Pathology in a Rabbit Model

[1350] The goal of the experiment was to test whether the nucleic acid encoded RUNX inhibitor is also effective in a clinically relevant rabbit model for PVR. RNA formulations used in the experiment were prepared according to Example 1, and methods used herein are further described in Example 2.

[1351] First, the delivery capabilities of the cationic polymer carrier was tested in vivo using RNA encoding for luciferase by injection of 36.5 μg RNA formulation (in 50 μl injection volume) into the vitreous cavity of rabbit eyes previously injected with C-PVR cells. A robust increase in luciferase activity in the vitreous containing human C-PVR cells was observed after administration of the formulation, showing that the formulation is suitable for in vivo applications (FIG. 4A). Next, the RUNX trap RNA formulation SEQ ID NO: 820 was tested in the in vivo PVR rabbit model. Rabbits received two injections of the RUNX trap RNA formulations (36.5 μg RNA in 50 μl injection volume) administered one week apart for a total duration of treatment of two weeks starting immediately after injection of C-PVRs (FIG. 4B).

[1352] The vehicle injected eyes developed PVR epiretinal membranes and had an average PVR severity score of 6.9±0.67 S.E.M whereas eyes that received the RNA encoded RUNX trap had less severe manifestations of disease with an average PVR score of 3.67±1.1 S.E.M (p<0.05) and less extracellular matrix deposition surrounding the injected C-PVR cells (FIG. 4C-E).

[1353] Interestingly, no PVR-related pathology has been observed in one of the RUNX trap treated eyes (PVR score=0). Measures of severity with our PVR scoring system comprising optical coherence tomography (OCT) data and clinical assessment agreed with more traditional scoring based on the Fastenberg scale to show less PVR pathology in RUNX trap treated eyes (FIG. 4E). Accordingly, histopathologic examination of rabbit eyes treated with the RUNX trap confirms a reduction in cellular proliferation and extracellular matrix deposition

[1354] Accordingly, the results show that intraocular administration of the RNA encoded RUNX trap led to a reduction in cellular proliferation and extracellular matrix deposition and strongly reduced severity of PVR in human PVR cells in a rabbit eye.

### Example 6: RNA-Encoded RUNX Trap Treatment Reversed EMT in C-PVR

[1355] Methods used herein are further described in Example 2.
[1356] scRNA-seq was used to assess gene expression changes related to EMT in C-PVR treated with the RNA encoded RUNX trap and controls. A higher percentages of cells with epithelial phenotypes (4%) and transitioning cells (6%) have been found after treatment with the RNA encoded RUNX trap compared with control. In contrast, the number of mesenchymal cells was lower by 10% after treatment with the RNA encoded RUNX trap compared with control (FIG. 4F).

[1357] This finding suggested that treatment with the RNA encoded RUNX trap triggered a mesenchymal to epithelial transition within these cells (MET). scRNA-seq data was used to predict cell evolution trajectories on a time scale, or RNA velocity, to further confirm the effect of the RNA encoded RUNX trap in regulating MET. An increase in splicing ratio molecule counts transcribed from the gene MARVELD2 was observed, an epithelial gene marker, after treatment with RNA encoded RUNX trap compared with control, indicative of cell differentiation towards epithelial phenotypes (FIG. 4G).

[1358] Differential gene expression analysis showed that treatment with the RNA encoded RUNX trap significantly reduced the expression of EMT related genes including TGFbeta2, SMAD3 and COL1A1 (p<0.05). (FIG. 4H). Accordingly, Treatment of C-PVR cells with the RNA encoded RUNX trap led to a significant reduction in EMT-associated genes including TGFbeta2, SMAD3 and COL1A1, genes that are directly involved in extracellular matrix deposition.

[1359] These results indicate the presence of a positive feedback loop between TGFbeta2 signalling and RUNX1 inducing EMT that was effectively inhibited and reversed by the RUNX trap (FIG. 4I).

### Summary of the Findings of Example 1 to 6

[1360] As demonstrated in the present Examples, an artificial nucleic acid encoding a transcription factor inhibitor according to the invention was effective in reducing the activity of the target transcription factor. As exemplified for a RUNX trap, a fusion protein comprising fragments of CBFbeta and SMMHC, the provided nucleic acid encoding said RUNX trap efficiently sequestered RUNX1 from the cell nucleus by binding and trapping the target transcription factor in the cytosol. That strongly reduced proliferation in primary human cell cultures derived from surgically excised membranes from eyes of patients with proliferative vitreoretinopathy (PVR). In addition, the expression of cellular RUNX1 was reduced and gene expression in the treated cells was shifted from a mesenchymal phenotype towards an epithelial profile across the EMT continuum (e.g. cellular expression of TGFbeta2, SMAD3, COL1A1 was reduced and). Furthermore, intravitreal administration of the RNA encoded RUNX trap strongly reduced proliferation and ocular pathology triggered by injection of human PVR cells in a rabbit eye. Mechanistically, treatment with the RNA encoded RUNX trap reversed EMT. This was illustrated by an increase of the epithelial cell clusters at the expense of mesenchymal cell clusters and by an increase in the transcription rate of MARVELD2, a tight junction associated epithelial marker, as a predictor of the future state of the cell.

[1361] In conclusion, the RNA encoded RUNX trap therapeutically targeting RUNX1 can effectively inhibit and reverse EMT in C-PVR cells and significantly reduce the severity of PVR in a rabbit model inter alia through the downregulation of key mediators of the TGFbeta/Smad3 pathway, effectively reducing cellular proliferation.

[1362] The data clearly demonstrates that the RNA encoded RUNX trap is suitable for medical uses and methods of treatment for diseases associated with RUNX, for example disorder, or condition associated with or caused by pathological epithelial to mesenchymal transition (EMT), pathological cell proliferation, aberrant angiogenesis, aberrant neovascularization, degeneration, and/or fibrosis.

[1363] Moreover, the data exemplifies how the present invention could be leveraged to develop a plethora of therapeutic artificial nucleic acid constructs for providing transcription factor inhibitors against transcription factors that are overexpressed and/or overactive in a disease, disorder, or condition.

### Example 7: RUNX Trap Variants

[1364] The goal of the experiment was to test whether different RUNX trap variants (Table 7) reduce proliferation of C-PVRs in vitro without having an impact on cell viability. RNA formulations encoding RUNX trap variants used in the experiment were prepared according to Example 1, methods used herein are described in Example 2.

[1365] Briefly, all resulting mRNAs have been formulated in CVCMs. Proliferation and cell viability assays (Example 2.4) have been performed to validate their functional activity. Hereby, C-PVR cells (10,000 cells/well) were cultured and maintained in 96-well plates. Cells were incubated with the RUNX variant formulations for 4 hours in serum free media. The proliferation rate was measured using CyQUANT Direct Cell Proliferation Assay (ThermoFisher, Waltham, MA) according to the manufacturer's recommendation. Cell viability was measured using a lactate dehydrogenase (LDH) assay (Promega, G1780).

TABLE 7
RUNX trap variant constructs used in Example 7

| | | | SEQ | SEQ | SEQ |
|---|---|---|---|---|---|
| | | | ID NO: | ID NO: | ID NO: |
| RNA ID | Variant | Name | Protein | CDS | RNA |
| R11353 | 1 | CBFbeta(1-165)-SMMHC(1527-1877) | 232 | 418 | 1582 |
| R11345 | 2 | CBFbeta(1-165)-HIF1alpha(549-575) | 234 | 420 | 822 |
| R11346 | 3 | RUNX1(1-177)-RUNX1T1a(31-604) | 236 | 422 | 824 |
| R11349 | 4 | RUNX1(K83E, R174Q) | 197 | 383 | 818 |
| R11302 | 5 | CBFbeta(1-165)-SMMHC(1527-1877) | 232 | 418 | 820 |
| R11344 | 6 | CBFbeta(1-141)-SMMHC(1527-1877) | 1545 | 1553 | 1563 |
| R9744 | 7 | CBFbeta(1-165)-Linker-LifeAct | 1548 | 1556 | 1566 |

### Summary of the Findings

[1366] RUNX trap variants 1-4 and 6 already show a reduced proliferation of C-PVRs in vitro 24 h after transfection (FIG. 5). All RUNX trap mRNA variants reduce proliferation of C-PVRs in vitro 48 h after transfection (FIG. 6) and did not have an impact on cell viability.

### Example 8: SM-102 LNP-Formulated mRNA Encoding RUNX Trap Tested in ARPE-19 Cells

[1367] The goal of the experiment was to analyse the transfection efficiency (intracellular levels of CBFbeta) of eye cells using an LNP formulation. In the present example, SM-102 LNP-formulated mRNA encoding RUNX trap was used to transfect ARPE-19 cells. ARPE-19 is a spontaneously arising retinal pigment epithelia (RPE) cell line derived from the normal eyes of a 19-year-old male.

[1368] ARPE-19 cells were transfected with 200 ng of SM-102 LNP-formulated mRNA encoding RUNX trap (LNP1: R11302-unmodified and LNP2: R11316-N1-methylpseudouridine (m1w) modified). RNA formulations encoding RUNX trap used in the experiment were prepared according to Example 1, Western Blot analysis used herein is described in Example 2. Briefly, the samples were heated to 90° C. for 5 min and 30 μg RNA/sample was loaded on the gel. CBFbeta and actin were stained.

TABLE 8
LNP formulations and RUNX trap constructs used in Example 8

| | mRNA | | |
|---|---|---|---|
| LNP | TYPE | MW | SEQ ID NO: |
| LNP1:SM-102 | R11302 | 593114.6 | 820 |
| | non-modified | | |
| LNP2:SM-102 | R11316 | 595075.8 | 1580 |
| | m1ψ modified | | |

### Summary of the Findings

[1369] The data shows that LNP formulations (here SM-102 LNP) are effective and suitable for transfecting eye cells. CBFbeta could be detected in cells transfected with SM-102 LNPs for both mRNA constructs. In that experimental setting, levels of CBFbeta detected in cells transfected with non-modified mRNAs were slightly higher than those determined in cells transfected with N1-methylpseudouridine-modified mRNA (FIG. 7).

### Example 9: 315 LNP-Formulated mRNA Encoding Optimized RUNX Trap Tested in ARPE-19 Cells

[1370] The goal of the experiment was to analyse the transfection efficiency (intracellular levels of CBFbeta) of eye cells using an alternative LNP formulation. In the present example, 315 LNP-formulated mRNA encoding RUNX trap was used to transfect ARPE-19 cells.

[1371] Different sequence optimized RUNX trap mRNAs were compared (Table 9). ARPE cells were seeded 75.000 cell per well 24h prior transfection. 200 ng of RNA (each LNP-formulated RNA in 5 replicates) were transfected per well. Cells were harvested after 24 h after transfection and stained with 1st antibody (anti-CBFbeta) and secondary antibody (CF633) for FACS analysis. RNA formulations used in the experiment were prepared according to Example 1, methods used herein are described in Example 2.

[1372] Different codon-optimized and LNP-formulated mRNAs encoding RUNX trap were analyzed using FACS analysis:

TABLE 9
Different GC-optimized mRNAs encoding RUNX trap used in Example 9

| Formulation | mRNA | SEQ ID NO: | Optimization | LNP |
|---|---|---|---|---|
| F1 | R11350 | 830 | opt1 | L315C_R11602 |
| F2 | R11352 | 850 | opt3 | L315C_R11558 |
| F3 | R11302 | 820 | opt1 | L315C_R11641 |
| F4 (luciferase) | R8730 | 1520 | none | L315C_R11285 |

### Summary of the Findings

[1373] The data shows that 315 LNP formulations are effective and suitable for transfecting eye cells. Levels of protein production (CBFbeta) were comparable between the three tested codon optimizations (FIG. 8).

### Example 10:315 LNP-Formulated mRNA Encoding RUNX Trap Tested in C-PVR Cells

[1374] Different modified mRNAs encoding RUNX trap have been formulated in LNPs and tested in cells deriving form patients with PVR. RNA formulations used in the experiment were prepared according to Example 1, methods used herein are described in Example 2.

[1375] CBFbeta expression from RUNX trap formulations (Table 10) was analyzed using Western Blot (data not shown). Proliferation and cell viability assays (Example 2.4) have been performed to validate their functional activity. Hereby, C-PVR cells (10,000 cells/well) were cultured and maintained in 96-well plates. Cells were incubated with the RUNX variant formulations for 4 hours in serum free media. The proliferation rate was measured using CyQUANT Direct

[1376] Cell Proliferation Assay (ThermoFisher, Waltham, MA) according to the manufacturer's recommendation. Cell viability was measured using a lactate dehydrogenase (LDH) assay (Promega, G1780).

[1377] For IFNα analysis, C-PVR cells were cultured and maintained in 96-well plates. Cells were incubated with the RUNX trap-LNP formulation F5, F6, and F7 for 4 hours in complete media with the different concentrations. After 4 hours the media was switched to complete media without formulations and cells incubated for 20 hours. 24 hours post treatment, the cell supernatants were collected for detection and measurement of human pan interferon-alpha using Human pan IFNalpha ELISA Kit (Catalog #02000) of Stemcell following the manufacturer's protocol.

[1378] For LDL toxicity assay, C-PVR cells were cultured and maintained in 96-well plates. The cells were incubated with the formulations in media with serum. After exchanging the media the cells were further incubated and an LDH toxicity assay was performed according to the manufacturer's instructions.

[1379] Levels of cyclin D, a proliferation marker, were measured according to the manufacturer's instructions.

[1380] In brief, protein concentration was determined by Pierce bicinchoninic acid protein assay kit (ThermoFisher, Waltham, MA; 23227), according to the manufacturer's instructions. A total of 20 μg of total cell lysates was prepared in 4 μl 1 mol/L 1,4-dithiothreitol (Sigma Aldrich) and 10 μl Laemmli buffer (Boston Bioproducts, Ashland, MA) to a final volume of 40 μl and denatured for 5 minutes at 90° C. Samples were separated electrophoretically for 1 hour at 70 V using 4% to 20% precast gradient gels (MiniPROTEAN TGX; Bio-Rad, Hercules, CA) and SDS-Tris-Glycine buffer (Bio-Rad). Proteins were transferred to 0.45 μm nitrocellulose membranes for 1 hour at 70 V in ice-cold 20% Methanol Tris-Glycine buffer (Bio-Rad). Membranes were blocked for 1 hour with Odyssey Blocking Buffer (LI-COR Biosciences, Lincoln, NE). The membrane was then probed with Cyclin D1 Monoclonal Antibody (Thermo Fisher, Cat No 2G3G5) concentration (1:2000) followed by anti-mouse secondary antibody for 1 hour and washed 3× with Tris-buffered saline with Tween 20. Immunoreactive bands were detected using the Odyssey Infrared Imaging System and visualized on the Image Studio version 2.1 software (LI-COR Biosciences).

TABLE 10
RUNX trap formulations used in Example 10

| | | SEQ | | |
|---|---|---|---|---|
| Formulation | mRNA | ID NO: | Modification | LNP |
| F5 | R11353 | 1582 | pseudouridine | L315C_R11544 |
| F6 | R11316 | 1580 | N1-methylpseudouridine | L315C_R11545 |
| F7 | R11315 | 910 | none | L315C_R11546 |

### Summary of the Findings

[1381] All formulations (F5-F7) show a clear dose dependent effect on proliferation upon transfection with mRNAs encoding RUNX traps (FIG. 9A). Low levels of IFNalpha could be detected and no clear differences between different mRNAs could be detected. The levels were the lowest in cells transfected with highest concentrations of mRNA, suggesting RUNX trap might have an anti-inflammatory effect (FIG. 9B). The transfection of C-PVR cells with RUNX trap formulations does not impair cell viability (FIG. 9C). Levels of cyclin D, a proliferation marker, were decreased in cells transfected with LNPs carrying mRNAs encoding RUNX trap (FIG. 9D).

### Example 11: Dose Effect of RUNX Trap 315 LNPs in a Laser-CNV Mice Model

[1382] 315 LNPs carrying mRNA encoding RUNX trap have been tested in an in vivo CNV model in mice. For the laser-induced choroidal neovascularization (CNV) model, laser photocoagulation was performed using the Micron image-guide system (Pheonix, Oregon) and a 532 nm laser; 4 laser spots were administered at the 3-, 6-, 9-, and 12-o'clock meridians at 2-to-3-disc diameters of distance from the optic nerve head. Then, 1 μl of each treatment was injected via intravitreal administration. After 7 days of treatment, fundus fluorescein angiography was recorded under general anesthesia. 0.1 ml of 2% sodium fluorescein (AKORN, IL) was administered intraperitoneally, and serial photographs from the early (0 to 60 seconds) and late phases (6 minutes) were captured using the Micron IV imaging system (Pheonix, OR). Light source intensity and gain were standardized and maintained in all experiments. Animals were treated with vehicle, Eylea (40 μg/μl), or 1 μl of an LNP formulation (R11302, L315_R11641 non-modified mRNA, SEQ ID NO:820) at two concentrations (25 ng/μl and 50 ng/μl; ng referring to RNA). Leakage was quantified using ImageJ V13, recording the difference between the early and late phases of the lesions. Experimental groups were compared by a Kruskal-Wallis followed by a Dunn's test. The lesion sizes were also quantified on choroidal flat-mounts after ILB4 (Isolectin-IB 4) vascular staining which was performed according to manufacturer's description. Eylea (also known as Zaltrap) was used as a positive control and is an FDA-approved, anti-VEGF (anti-vascular endothelial growth factor) medication to treat wet age-related macular degeneration (AMD), impaired vision due to macular oedema (central retinal vein occlusion (CRVO) or branch retinal vein occlusion (BRVO)), impaired vision due to macular oedema caused by diabetes and impaired vision due to myopic choroidal neovascularization. Eylea contains the active substance aflibercept.

### Summary of the Findings

[1383] A dose of 25 ng RUNX trap mRNA (formulated in 315 LNPs) was sufficient to reduce leakage after 7 days of treatment (FIG. 10A). After 7 days of treatment, LNP-formulated RUNX trap reduces lesion size in a laser-CNV mouse model (FIG. 10B). A dose of 50 ng RUNX trap mRNA (formulated in 315 LNPs) was equally effective to Eylea and doses of 25 ng were even more effective in reducing lesion size compared to Eylea. Moreover, the data shows that the used LNP formulation is effective for ocular administration (intravitreal injection) of RNA, in particular mRNA encoding RUNX inhibitors.

### Example 12 LNP-Formulated mRNA Encoding RUNX Trap in a PVR Rabbit Disease Model

[1384] The goal of this study is to confirm efficacy of LNP-formulated mRNA encoding RUNX trap in a PVR rabbit disease model. The experiments are performed essentially as described in Example 5.

[1385] 315 LNPs formulated RUNX trap mRNA (R11316, SEQ ID NO:1580 N1-methylpseudouridine (m1w) modified) or CVCM formulated RUNX trap mRNA (R9717, SEQ ID NO:820, non-modified) is injected intravitreally in eyes of a PVR rabbit disease model.

[1386] As a control, a small molecule RUNX1 inhibitor Ro5-335 is used (Delgado-Tirado et al., 2020). Details regarding the experimental setup are provided in Table 11.

TABLE 11
Study groups used in Example 12

| | | Administration | | Number of |
|---|---|---|---|---|
| Group | Administration | route | Dose | rabbits |
| 1 | NaCl | Intravitreal injection | 50 μl | N = 8 rabbits |
| 2 | RUNX trap mRNA in CVMCs | Intravitreal injection | 36 μg in 50 μl volume | N = 8 rabbits |
| 3 | RUNX trap mRNA in LNPs | Intravitreal injection | 3 μg in 50 μl volume | N = 8 rabbits |
| 4 | RUNX trap mRNA in LNPs | Intravitreal injection | 1 μg in 50 μl volume | N = 8 rabbits |
| 5 | RUNX trap mRNA in LNPs | Intravitreal injection | 0.3 μg in 50 μl volume | N = 8 rabbits |
| 6 | Small molecule inhibitor Ro5-335 | Eye drops | 3×/day | N = 16 rabbits |

1. An artificial nucleic acid comprising at least one coding sequence encoding at least one RUNX transcription factor inhibitor for reducing or inhibiting the activity of a RUNX target transcription factor in a cell, wherein the nucleic acid comprises at least one heterologous untranslated region (UTR).

2. The artificial nucleic acid of claim 1, wherein the RUNX transcription factor inhibitor is produced in the cytosol upon administration of the artificial nucleic acid to a cell, tissue, or subject.

3. The artificial nucleic acid of claim 1 or 2, wherein the RUNX transcription factor inhibitor is a dominant negative inhibitor of the target transcription factor and/or its transcription co-factor.

4. The artificial nucleic acid of claims 1 to 3, wherein the RUNX target transcription factor is selected from RUNX1, RUNX2, RUNX3, preferably RUNX1.

5. The artificial nucleic acid of claims 1 to 4, wherein the RUNX transcription factor inhibitor comprises at least one amino acid sequence element A that is configured to bind to the target transcription factor or its transcription co-factor.

6. The artificial nucleic acid of any one of the preceding claims, wherein the RUNX transcription factor inhibitor comprises at least one amino acid sequence element A that comprises or consists of an amino acid sequence selected or derived from the target transcription factor, an interaction partner of the target transcription factor, a binding partner of the target transcription factor, a transcription co-factor of the target transcription factor, an antibody moiety, an intrabody moiety, a peptide-based aptamer, or a fragment or variant of any of these.

7. The artificial nucleic acid of claim 5 or 6, wherein the at least one amino acid sequence element A comprises or consists of an amino acid sequence selected or derived from a transcription co-factor of RUNX, or a fragment or variant thereof.

8. The artificial nucleic acid of claim 7, wherein the transcription co-factor of RUNX is selected or derived from CBFbeta, for example CBFbeta1 or CBFbeta2, or a fragment or variant thereof.

9. The artificial nucleic acid of claim 8, wherein the CBFbeta amino acid sequence is an N-terminal fragment of a human CBFbeta, preferably a fragment comprising amino acid 1 to amino acid 141 of CBFbeta, more preferably a fragment comprising amino acid 1 to amino acid 162 of CBFbeta.

10. The artificial nucleic acid of any one of the preceding claims, wherein the RUNX transcription factor inhibitor comprises at least one amino acid sequence element A that comprises or consists of an amino acid sequence selected or derived from CBFbeta being identical or at least 70%, 80%, 85%, 86%, 87%, 88%, 89%, 90%, 91%, 92%, 93%, 94%, 95%, 96%, 97%, 98%, or 99% identical to any one of SEQ ID NOs: 178-183, or fragments or variants of any of these.

11. The artificial nucleic acid of claim 5 or 6, wherein the at least one amino acid sequence element A comprises or consists of an amino acid sequence selected or derived from the RUNX target transcription factor, or a fragment or variant thereof.

12. The artificial nucleic acid of claim 11, wherein the amino acid sequence selected or derived from the RUNX target transcription factor comprises at least one amino acid substitution or deletion that reduces or prevents binding to its target DNA and/or at least one amino acid substitution or deletion that reduces or prevents nuclear translocation and/or at least one amino acid substitution or deletion that reduces or prevents homodimerization or heterodimerization.

13. The artificial nucleic acid of claim 11 or 12, wherein the at least one amino acid sequence element A comprises or consists of an amino acid sequence selected or derived from RUNX or a fragment or variant thereof, preferably wherein the RUNX amino acid sequence is an N-terminal fragment of a human RUNX1, e.g. a fragment comprising the Runt homology domain (RHD).

14. The artificial nucleic acid of claim 13, wherein at least one amino acid substitution in the RUNX1 amino acid sequence is selected from R80A, K83A, K83E, R135A, R139A, R142A, K167A, T169A, D171A, R174A, or R177A, or any functionally equivalent amino acid substitution at position R80, K83, R135, R139, R142, K167, T169, D171, R174, or R177, preferably wherein at least one amino acid substitution in the RUNX1 amino acid sequence is selected from R174Q and/or K83E, or any functionally equivalent amino acid substitution at position R174 and/or K83.

15. The artificial nucleic acid of claims 11 to 14, wherein the RUNX transcription factor inhibitor comprises at least one amino acid sequence element A that comprises or consists of an amino acid sequence selected or derived from RUNX1 being identical or at least 70%, 80%, 85%, 86%, 87%, 88%, 89%, 90%, 91%, 92%, 93%, 94%, 95%, 96%, 97%, 98%, or 99% identical to any one of SEQ ID NOs: 197-215, or fragments or variants of any of these.

16. The artificial nucleic acid of any one of the preceding claims, wherein the RUNX transcription factor inhibitor comprises at least one amino acid sequence element B that is configured to prevent or reduce the interaction of the target transcription factor with its target DNA.

17. The artificial nucleic acid of any one of the preceding claims, wherein the RUNX transcription factor inhibitor comprises at least one amino acid sequence element B that is configured to prevent or reduce interaction of the RUNX target transcription factor with at least one transcription co-factor of the RUNX target transcription factor.

18. The artificial nucleic acid of any one of the preceding claims, wherein the RUNX transcription factor inhibitor comprises at least one amino acid sequence element B that is configured to prevent or reduce nuclear translocation of the RUNX target transcription factor or its transcription co-factor.

19. The artificial nucleic acid of any one of the preceding claims, wherein the RUNX transcription factor inhibitor comprises at least one amino acid sequence element B that is configured to bind the RUNX target transcription factor or its transcription co-factor preferably in the cytosol.

20. The artificial nucleic acid of any one of the preceding claims, wherein the RUNX transcription factor inhibitor comprises at least one amino acid sequence element B that comprises or consists of an amino acid sequence selected or derived from a cytoplasmic protein, a protein that is associated with or binds to a cytoplasmic protein, or a fragment or variant thereof.

21. The artificial nucleic acid of claims 16 to 20, wherein the amino acid sequence element B is selected or derived from a cytoskeletal protein or a protein that is associated with or binds to a cytoskeletal protein, or a fragment or variant of any of these.

22. The artificial nucleic acid of claims 16 to 21, wherein the amino acid sequence element B is selected or derived from a myofibrillar protein, a microtubule protein, an intermediate filament protein, or a fragment or variant of any of these or selected or derived from a peptide or protein that is associated with or binds to a myofibrillar protein, a microtubule protein, an intermediate filament protein, or a fragment or variant of any of these.

23. The artificial nucleic acid of claims 16 to 22, wherein the amino acid sequence element B is selected or derived from a protein that comprises an myofibrillar binding domain (e.g. actin), a microtubule binding domain, an intermediate filament binding domain, preferably wherein the amino acid sequence element B is selected or derived from a protein that comprises an actin binding domain.

24. The artificial nucleic acid of claims 16 to 23, wherein the amino acid sequence element B is selected from smooth muscle myosin heavy chain (SMMHC), or a fragment or variant thereof.

25. The artificial nucleic acid of claim 24, wherein the amino acid sequence selected or derived from SMMHC comprises at least one of a high-affinity binding domain (HABD) and/or an assembly competent domain (ACD) and/or a transcriptional repression domain (TRD), or fragments or variants of any of these.

26. The artificial nucleic acid of claim 24 or 25, wherein the SMMHC amino acid sequence is a C-terminal fragment of a human SMMHC, for example an SMMHC fragment comprising amino acid 1527 to amino acid 1972.

27. The artificial nucleic acid of claims 24 to 26, wherein the SMMHC amino acid sequence comprises a deletion in the C-terminus of about 95aa (SMMHCAC95), for example an SMMHC fragment comprising amino acid 1527 to amino acid 1877.

28. The artificial nucleic acid of any one of the preceding claims, wherein the RUNX transcription factor inhibitor comprises at least one amino acid sequence element B that comprises or consists of an amino acid sequence being identical or at least 70%, 80%, 85%, 86%, 87%, 88%, 89%, 90%, 91%, 92%, 93%, 94%, 95%, 96%, 97%, 98%, or 99% identical to any one of SEQ ID NOs: 184-193, 1521, 1522, or fragments or variants of any of these.

29. The artificial nucleic acid of claims 16 to 19, wherein the at least one element B comprises or consists of an amino acid sequence selected or derived from a transcriptional repressor of the RUNX target transcription factor, or a fragment or variant thereof, preferably wherein the transcriptional repressor of the RUNX target transcription factor is selected or derived from RUNX1T1a, RUNX1T1b, or a fragment or variant of any of these.

30. The artificial nucleic acid of claim 29, wherein the RUNX transcription factor inhibitor comprises at least one amino acid sequence element B that comprises or consists of an amino acid sequence being identical or at least 70%, 80%, 85%, 86%, 87%, 88%, 89%, 90%, 91%, 92%, 93%, 94%, 95%, 96%, 97%, 98%, or 99% identical to any one of SEQ ID NOs: 216-230, or fragments or variants of any of these.

31. The artificial nucleic acid of claims 16 to 19, wherein the at least one element B comprises or consists of an amino acid sequence selected or derived from a peptide or protein that promotes degradation of the target transcription factor, or a fragment or variant thereof.

32. The artificial nucleic acid of claim 31, wherein the peptide or protein that promotes degradation may be selected from a protein that binds to E3 ligase, preferably a protein selected from HIF1alpha, MDM2, or CRBN, or a fragment or variant of any of these, preferably wherein the peptide or protein that promotes degradation is selected or derived from HIF1alpha, preferably a HIF1alpha fragment comprising amino acid 549 to amino acid 575.

33. The artificial nucleic acid of claim 31 or 32, wherein the RUNX transcription factor inhibitor comprises at least one amino acid sequence element B that comprises or consists of an amino acid sequence being identical or at least 70%, 80%, 85%, 86%, 87%, 88%, 89%, 90%, 91%, 92%, 93%, 94%, 95%, 96%, 97%, 98%, or 99% identical to any one of SEQ ID NOs: 194 or 195, or fragments or variants of any of these.

34. The artificial nucleic acid of any one of the preceding claims, wherein the RUNX transcription factor inhibitor is a fusion protein that comprises or consists of at least one amino acid sequence element A and at least one amino acid sequence element B, preferably wherein the at least one element A is located at the N-terminus of the transcription inhibitor and the at least one element B is located at the C-terminus of the transcription inhibitor.

35. The artificial nucleic acid of claim 34, wherein the RUNX transcription factor inhibitor comprises at least one further amino acid sequence element selected from a linker sequence, preferably a flexible linker, more preferably a flexible GGS linker according to SEQ ID NO: 196, or a variant thereof, optionally wherein the linker sequence is positioned between amino acid sequence element A and amino acid sequence element B.

36. The artificial nucleic acid of any one of the preceding claims, wherein the RUNX transcription factor inhibitor is a RUNX trap, preferably a RUNX1 trap.

37. The artificial nucleic acid of any one of the preceding claims, wherein the RUNX transcription factor inhibitor, preferably the RUNX trap, comprises or consists of a fusion protein comprising a CBFbeta amino acid sequence element and an SMMHC amino acid sequence element.

38. The artificial nucleic acid of any one of the preceding claims, wherein the RUNX transcription factor inhibitor, preferably the RUNX trap, comprises or consists of an amino acid sequence being identical or at least 70%, 80%, 85%, 86%, 87%, 88%, 89%, 90%, 91%, 92%, 93%, 94%, 95%, 96%, 97%, 98%, or 99% identical to any one of SEQ ID NOs: 231-233, 1541-1548, or fragments or variants of any of these.

39. The artificial nucleic acid of any one of the preceding claims, wherein the RUNX transcription factor inhibitor, preferably the RUNX trap, comprises or consists of an amino acid sequence being identical or at least 70%, 80%, 85%, 86%, 87%, 88%, 89%, 90%, 91%, 92%, 93%, 94%, 95%, 96%, 97%, 98%, or 99% identical to SEQ ID NO: 232, or a fragment or variant thereof.

40. The artificial nucleic acid of any one of the preceding claims, wherein the RUNX transcription factor inhibitor, preferably the RUNX trap, sequesters cellular RUNX by binding to RUNX in the cytosol and preferably trapping RUNX1 in the cytosol.

41. The artificial nucleic acid of claims 1 to 35, wherein the RUNX transcription factor inhibitor comprises or consists of a fusion protein comprising a CBFbeta amino acid sequence element and an HIF1alpha amino acid sequence element.

42. The artificial nucleic acid of claim 41, wherein the RUNX transcription factor inhibitor comprises or consists of an amino acid sequence being identical or at least 70%, 80%, 85%, 86%, 87%, 88%, 89%, 90%, 91%, 92%, 93%, 94%, 95%, 96%, 97%, 98%, or 99% identical to any one of SEQ ID NOs: 234 or 235, or fragments or variants thereof.

43. The artificial nucleic acid of 41 or 42, wherein the RUNX transcription factor inhibitor degrades cellular RUNX.

44. The artificial nucleic acid of claims 1 to 35, wherein the RUNX transcription factor inhibitor comprises or consists of a fusion protein comprising a RUNX1 amino acid sequence element and a RUNX1T1a or RUNX1T1b amino acid sequence element.

45. The artificial nucleic acid of claim 44, wherein the RUNX transcription factor inhibitor comprises or consists of an amino acid sequence being identical or at least 70%, 80%, 85%, 86%, 87%, 88%, 89%, 90%, 91%, 92%, 93%, 94%, 95%, 96%, 97%, 98%, or 99% identical to any one of SEQ ID NOs: 236-239, or fragments or variants thereof.

46. The artificial nucleic acid of claims 1 to 35, wherein the RUNX transcription factor inhibitor comprises or consists of an amino acid sequence being identical or at least 70%, 80%, 85%, 86%, 87%, 88%, 89%, 90%, 91%, 92%, 93%, 94%, 95%, 96%, 97%, 98%, or 99% identical to SEQ ID NO: 197, or a fragment or a variant thereof.

47. The artificial nucleic acid of claims 44 to 46, wherein the RUNX transcription factor inhibitor drives transcriptional repression of genes that are under control of RUNX.

48. The artificial nucleic acid of any one of the preceding claims, wherein the RUNX transcription factor inhibitor, preferably the RUNX trap, reduces or prevents the interaction of cellular RUNX with cellular CBFbeta.

49. The artificial nucleic acid of any one of the preceding claims, wherein the RUNX transcription factor inhibitor, preferably the RUNX trap, reduces cellular RUNX-CBFbeta complex formation and/or activity.

50. The artificial nucleic acid of any one of the preceding claims, wherein the RUNX transcription factor inhibitor, preferably the RUNX trap, reduces the cellular expression of RUNX controlled or regulated gene products.

51. The artificial nucleic acid of any one of the preceding claims, wherein the RUNX transcription factor inhibitor, preferably the RUNX trap, reduces the cellular expression of RUNX, TGFbeta2, SMAD3, and/or COL1A1.

52. The artificial nucleic acid of any one of the preceding claims, wherein the RUNX transcription factor inhibitor, preferably the RUNX trap, reduces or prevents pathological epithelial to mesenchymal transition (EMT), pathological cell proliferation, aberrant angiogenesis, aberrant neovascularization, degeneration, and/or fibrosis.

53. The artificial nucleic acid of any one of the preceding claims, wherein the at least one coding sequence is a codon modified coding sequence, preferably wherein codon modified coding sequence is selected from a C maximized coding sequence, a CAI maximized coding sequence, human codon usage adapted coding sequence, a G/C content modified coding sequence, and a G/C optimized coding sequence, or any combination thereof, preferably wherein the at least one codon modified coding sequence is a G/C optimized coding sequence.

54. The artificial nucleic acid of any one of the preceding claims, wherein the at least one coding sequence comprises a nucleic acid sequence encoding an amino acid sequence element A, wherein the nucleic acid sequence is identical or at least 70%, 80%, 85%, 86%, 87%, 88%, 89%, 90%, 91%, 92%, 93%, 94%, 95%, 96%, 97%, 98%, or 99% identical to any one of SEQ ID NOs: 240-245, 302-307, 364-369, 426-431, 488-493, 550-555, 612-617, 674-679, 736-741, or a fragment or a variant of any of these.

55. The artificial nucleic acid of any one of the preceding claims, wherein the at least one coding sequence comprises a nucleic acid sequence encoding an amino acid element B, wherein the nucleic acid sequence is identical or at least 70%, 80%, 85%, 86%, 87%, 88%, 89%, 90%, 91%, 92%, 93%, 94%, 95%, 96%, 97%, 98%, or 99% identical to any one of SEQ ID NOs: 246-255, 308-317, 370-379, 432-441, 494-503, 556-565, 618-627, 680-689, 742-751, 1523-1540, or a fragment or a variant of any of these.

56. The artificial nucleic acid of any one of the preceding claims, wherein the at least one coding sequence comprises or consists of a nucleic acid sequence encoding a RUNX transcription factor inhibitor, preferably a RUNX trap, that is identical or at least 70%, 80%, 85%, 86%, 87%, 88%, 89%, 90%, 91%, 92%, 93%, 94%, 95%, 96%, 97%, 98%, or 99% identical to any one of SEQ ID NOs: 293-295, 355-357, 417-419, 479-481, 541-543, 603-605, 665-667, 727-729, 789-791, 1549-1558, or a fragment or a variant of any of these.

57. The artificial nucleic acid of any one of the preceding claims, wherein the at least one coding sequence comprises or consists of a nucleic acid sequence encoding a RUNX transcription factor inhibitor, preferably a RUNX trap CBFbeta-SMMHC, that is identical or at least 70%, 80%, 90%, 91%, 92%, 93%, 94%, 95%, 96%, 97%, 98%, or 99% identical to SEQ ID NO: 418, or a fragment or a variant thereof.

58. The artificial nucleic acid of claims 1 to 54, wherein the at least one coding sequence comprises a nucleic acid sequence encoding an amino acid sequence element B, wherein the nucleic acid sequence is identical or at least 70%, 80%, 85%, 86%, 87%, 88%, 89%, 90%, 91%, 92%, 93%, 94%, 95%, 96%, 97%, 98%, or 99% identical to any one of SEQ ID NOs: 257, 319, 381, 443, 505, 567, 629, 691, 753, or a fragment or a variant of any of these.

59. The artificial nucleic acid of claim 58, wherein the at least one coding sequence comprises or consists of a nucleic acid sequence encoding a RUNX transcription factor inhibitor, preferably a RUNX inhibitor CBFbeta-HIF1alpha, that is identical or at least 70%, 80%, 85%, 86%, 87%, 88%, 89%, 90%, 91%, 92%, 93%, 94%, 95%, 96%, 97%, 98%, or 99% identical to any one of SEQ ID NOs: 296-297, 358-359, 420-421, 482-483, 544-545, 606-607, 668-669, 730-731, 792-793, or a fragment or a variant of any of these.

60. The artificial nucleic acid of claims 1 to 53, wherein the at least one coding sequence comprises a nucleic acid sequence encoding an amino acid element A, wherein the nucleic acid sequence is identical or at least 70%, 80%, 85%, 86%, 87%, 88%, 89%, 90%, 91%, 92%, 93%, 94%, 95%, 96%, 97%, 98%, or 99% identical to any one of SEQ ID NOs: 259-277, 321-339, 383-401, 445-463, 507-525, 569-587, 631-649, 693-711, 755-773, or a fragment or a variant of any of these.

61. The artificial nucleic acid of claim 60, wherein the at least one coding sequence comprises a nucleic acid sequence encoding an amino acid element B, wherein the nucleic acid sequence is identical or at least 70%, 80%, 85%, 86%, 87%, 88%, 89%, 90%, 91%, 92%, 93%, 94%, 95%, 96%, 97%, 98%, or 99% identical to any one of SEQ ID NOs: 278-292, 340-354, 402-416, 464-478, 526-540, 588-602, 650-664, 712-726, 774-788, or a fragment or a variant of any of these.

62. The artificial nucleic acid of claims 60 to 61, wherein the at least one coding sequence comprises or consists of a nucleic acid sequence encoding a RUNX transcription factor inhibitor, preferably a RUNX inhibitor RUNX1-RUNX1T1, that is identical or at least 70%, 80%, 85%, 86%, 87%, 88%, 89%, 90%, 91%, 92%, 93%, 94%, 95%, 96%, 97%, 98%, or 99% identical to any one of the nucleic acid sequences SEQ ID NOS: 298-301, 360-363, 422-425, 484-487, 546-549, 608-611, 670-673, 732-735, 794-797, or a fragment or a variant of any of these.

63. The artificial nucleic acid of claims 1 to 53, wherein the at least one coding sequence comprises or consists of a nucleic acid sequence encoding a RUNX transcription factor inhibitor, preferably a RUNX inhibitor RUNX1 (K83E, R174Q), that is identical or at least 70%, 80%, 85%, 86%, 87%, 88%, 89%, 90%, 91%, 92%, 93%, 94%, 95%, 96%, 97%, 98%, or 99% identical to any one of the nucleic acid sequences SEQ ID NOs: 259, 321, 383, 445, 507, 569, 631, 693, 755, or a fragment or a variant of any of these.

64. The artificial nucleic acid of any one of the preceding claims, wherein the at least one heterologous untranslated region (UTR) is selected from at least one heterologous 5′-UTR and/or at least one heterologous 3′-UTR.

65. The artificial nucleic acid of claim 64, wherein the at least one heterologous 3′-UTR comprises or consists of a nucleic acid sequence derived from a 3′-UTR of a gene selected from PSMB3, ALB7, alpha-globin, CASP1, COX6B1, GNAS, NDUFA1 and RPS9, or from a homolog, a fragment or a variant of any one of these genes, preferably wherein the at least one heterologous 3′-UTR comprises or consists of a nucleic acid sequence being identical or at least 70%, 80%, 85%, 86%, 87%, 88%, 89%, 90%, 91%, 92%, 93%, 94%, 95%, 96%, 97%, 98%, or 99% identical to SEQ ID NOs: 67-90, 109-120, or a fragment or a variant of any of these.

66. The artificial nucleic acid of claim 64 or 65, wherein the at least one heterologous 5′-UTR comprises or consists of a nucleic acid sequence derived from a 5′-UTR of a gene selected from HSD17B4, RPL32, ASAH1, ATP5A1, MP68, NDUFA4, NOSIP, RPL31, SLC7A3, TUBB4B and UBQLN2, or from a homolog, a fragment or variant of any one of these genes, preferably selected from HSD17B4, preferably wherein the at least one heterologous 3′-UTR comprises or consists of a nucleic acid sequence being identical or at least 70%, 80%, 85%, 86%, 87%, 88%, 89%, 90%, 91%, 92%, 93%, 94%, 95%, 96%, 97%, 98%, or 99% identical to SEQ ID NOs: 1-32, 65-66, or a fragment or a variant of any of these.

67. The artificial nucleic acid of claims 64 to 66, wherein the at least one heterologous 5′-UTR is selected from HSD17B4 and the at least one heterologous 3′ UTR is selected from PSMB3, preferably wherein.

68. The artificial nucleic acid of claims 64 to 67, wherein the at least one heterologous 3′-UTR comprises or consists of a nucleic acid sequence being identical or at least 70%, 80%, 85%, 86%, 87%, 88%, 89%, 90%, 91%, 92%, 93%, 94%, 95%, 96%, 97%, 98%, or 99% identical to SEQ ID NO: 68, or a fragment or a variant thereof.

69. The artificial nucleic acid of claims 64 to 68, wherein the at least one heterologous 5′-UTR comprises or consists of a nucleic acid sequence being identical or at least 70%, 80%, 85%, 86%, 87%, 88%, 89%, 90%, 91%, 92%, 93%, 94%, 95%, 96%, 97%, 98%, or 99% identical to SEQ ID NO: 2, or a fragment or a variant thereof.

70. The artificial nucleic acid of any one of the preceding claims, additionally comprising at least one poly(A) sequence, preferably wherein the at least one poly(A) sequence comprises about 40 to about 500 adenosine nucleotides, preferably about 60 to about 250 adenosine nucleotides, more preferably about 60 to about 150 adenosine nucleotides.

71. The artificial nucleic acid of claim 70, wherein the at least one poly(A) sequence comprises about 100 adenosine nucleotides.

72. The artificial nucleic acid of claim 70 or 71, wherein the at least one poly(A) sequence is located at the 3′ terminus, optionally, wherein the 3′ terminal nucleotide is an adenosine.

73. The artificial nucleic acid of any one of the preceding claims, additionally comprising at least one poly(C) sequence and/or at least one miRNA binding site and/or histone stem-loop sequence, preferably a histone stem-loop sequence.

74. The artificial nucleic acid of any one of the preceding claims, wherein the nucleic acid a DNA vector, preferably an AAV vector, or an RNA.

75. The artificial nucleic acid of any one of the preceding claims, wherein the nucleic acid is an RNA selected from mRNA, circular RNA, replicon RNA, or viral RNA.

76. The artificial nucleic acid of any one of the preceding claims, wherein the nucleic acid is an mRNA.

77. The artificial nucleic acid of claim 75 or 76, wherein the RNA comprises at least one modified nucleotide, preferably selected from pseudouridine (ψ) or N1-methylpseudouridine (m1ψ).

78. The artificial nucleic acid of claim 77, wherein the RNA comprises N1-methylpseudouridine (m1ψ).

79. The artificial nucleic acid of any one of the preceding claims, wherein the nucleic acid is a modified RNA wherein each uracil is substituted by N1-methylpseudouridine (m1ψ).

80. The artificial nucleic acid of any one of the preceding claims, wherein the nucleic acid is an RNA that comprises a 5′-cap structure.

81. The artificial nucleic acid of claim 80, wherein the 5′-cap structure is selected from a cap1 structure or a modified cap1 structure.

82. The artificial nucleic acid of any one of the preceding claims, wherein the nucleic acid is an in vitro transcribed RNA, preferably wherein RNA in vitro transcription has been performed in the presence of a sequence optimized nucleotide mixture.

83. The artificial nucleic acid of any one of the preceding claims, wherein the nucleic acid is a purified RNA, preferably wherein the RNA has been purified by RP-HPLC, AEX, SEC, hydroxyapatite chromatography, TFF, filtration, precipitation, core-bead flow through chromatography, oligo(dT) purification, cellulose-based purification, or any combination thereof.

84. The artificial nucleic acid of claim 83, wherein the at least one step of purification is selected from RP-HPLC and/or TFF.

85. The artificial nucleic acid of any one of the preceding claims, wherein the nucleic acid, preferably the RNA has an integrity of at least about 50%, preferably of at least about 60%, more preferably of at least about 70%, most preferably of at least about 80%.

86. The artificial nucleic acid of any one of the preceding claims, wherein the nucleic acid, preferably the RNA is suitable for use in treatment or prevention of a disease, disorder or condition, preferably an ocular disease, disorder or condition.

87. The artificial nucleic acid of any one of the preceding claims, wherein the nucleic acid, preferably the RNA comprises the following sequence elements preferably in 5′- to 3′-direction:
A) a 5′-cap structure;
B) a 5′-UTR preferably selected or derived from a 5′-UTR of a HSD17B4 gene;
C) a coding sequence encoding a RUNX inhibitor;
D) a 3′-UTR preferably selected or derived from a 3′-UTR of a PSMB3 gene;
E) optionally, a histone stem-loop; and
F) a poly(A) sequence preferably comprising about 100 A nucleotides.

88. The artificial nucleic acid of any one of the preceding claims, wherein the nucleic acid, preferably the RNA comprises or consists of a nucleic acid sequence which is identical or at least 70%, 80%, 85%, 86%, 87%, 88%, 89%, 90%, 91%, 92%, 93%, 94%, 95%, 96%, 97%, 98%, or 99% identical to a nucleic acid sequence selected from the group consisting of SEQ ID NOs: 798-1517, 1559-1582, or a fragment or variant of any of these sequences.

89. The artificial nucleic acid of any one of the preceding claims, wherein nucleic acid, preferably the RNA comprises or consists of a nucleic acid sequence which is identical or at least 70%, 80%, 85%, 86%, 87%, 88%, 89%, 90%, 91%, 92%, 93%, 94%, 95%, 96%, 97%, 98%, or 99% identical to a nucleic acid sequence selected from SEQ ID NOs: 799-801, 809-811, 819-821, 829-831, 839-841, 849-851, 859-861, 869-871, 879-881, 889-891, 899-901, 909-911, 919-921, 929-931, 939-941, 949-951, 959-961, 969-971, 979-981, 989-991, 999-1001, 1009-1011, 1019-1021, 1029-1031, 1039-1041, 1049-1051, 1059-1061, 1069-1071, 1079-1081, 1089-1091, 1099-1101, 1109-1111, 1119-1121, 1129-1131, 1139-1141, 1149-1151, 1159-1161, 1169-1171, 1179-1181, 1189-1191, 1199-1201, 1209-1211, 1219-1221, 1229-1231, 1239-1241, 1249-1251, 1259-1261, 1269-1271, 1279-1281, 1289-1291, 1299-1301, 1309-1311, 1319-1321, 1329-1331, 1339-1341, 1349-1351, 1359-1361, 1369-1371, 1379-1381, 1389-1391, 1399-1401, 1409-1411, 1419-1421, 1429-1431, 1439-1441, 1449-1451, 1459-1461, 1469-1471, 1479-1481, 1489-1491, 1499-1501, 1509-1511, 1559-1582, or a fragment or variant of any of these sequences.

90. The artificial nucleic acid of any one of the preceding claims, wherein the nucleic acid, preferably the RNA comprises or consists of a nucleic acid sequence which is identical or at least 70%, 80%, 85%, 86%, 87%, 88%, 89%, 90%, 91%, 92%, 93%, 94%, 95%, 96%, 97%, 98%, or 99% identical to a nucleic acid sequence selected from SEQ ID NOs: 800, 810, 820, 830, 840, 850, 860, 870, 880, 890, 900, 910, 920, 930, 940, 950, 960, 970, 1567, 1568, 1577, 1578-1582, 980, 990, 1000, 1010, 1020, 1030, 1040, 1050, 1060, 1070, 1080,1090, 1100, 1110, 1120, 1130, 1140, 1150, 1160, 1170, 1180, 1190, 1200, 1210, 1220, 1230, 1240, 1250, 1260, 1270, 1280, 1290, 1300, 1310, 1320, 1330, 1340, 1350, 1360, 1370, 1380, 1390, 1400, 1410, 1420, 1430, 1440, 1450, 1460, 1470, 1480, 1490, 1500, 1510, or a fragment or variant of any of these sequences.

91. The artificial nucleic acid of any one of the preceding claims, wherein the nucleic acid, preferably the RNA comprises or consists of a nucleic acid sequence which is identical or at least 70%, 80%, 90%, 91%, 92%, 93%, 94%, 95%, 96%, 97%, 98%, or 99% identical to a nucleic acid sequence selected from SEQ ID NOs: 820, 1579, 1581, 910, 1580 or 1582 or a fragment or variant of that sequence.

92. The artificial nucleic acid of claim 91, wherein the nucleic acid, preferably the RNA, comprises or consists of a nucleic acid sequence which is identical to the nucleic acid sequence SEQ ID NO: 1580 or 1579.

93. A pharmaceutical composition comprising at least one artificial nucleic acid comprising at least one coding sequence encoding at least one RUNX transcription factor inhibitor as defined in any one of the claims 1 to 92.

94. The pharmaceutical composition of claim 93, comprising at least one pharmaceutically acceptable carrier or excipient.

95. The pharmaceutical composition of claim 93 or 94, wherein the at least one artificial nucleic acid, preferably the RNA is formulated in at least one cationic or polycationic compound.

96. The pharmaceutical composition of claim 95, wherein the at least one cationic or polycationic compound is selected from a cationic or polycationic polymer, a cationic or polycationic polysaccharide, a cationic or polycationic lipid, a cationic or polycationic protein, a cationic or polycationic peptide, or any combinations thereof.

97. The pharmaceutical composition of claim 96, wherein the one or more cationic or polycationic peptides are selected from SEQ ID NOs: 173-177, or any combinations thereof.

98. The pharmaceutical composition of claim 97, wherein the cationic or polycationic polymer is selected from a polyethylene glycol/peptide polymer, preferably comprising HO-PEG5000-S-(S-CHHHHHHRRRRHHHHHHC-S-)7-S-PEG5000-OH (SEQ ID NO: 176 as peptide monomer), HO-PEG5000-S-(S-CHHHHHHRRRRHHHHHHC-S-) 4-S-PEG5000-OH (SEQ ID NO: 176 as peptide monomer), HO-PEG5000-S-(S-CGHHHHHRRRRHHHHHGC-S-) 7-S-PEG5000-OH (SEQ ID NO: 177 as peptide monomer), or HO-PEG5000-S-(S-CGHHHHHRRRRHHHHHGC-S-) 4-S-PEG5000-OH (SEQ ID NO: 177 as peptide monomer).

99. The pharmaceutical composition of claims 96 to 98, wherein the cationic or polycationic polymer additionally comprises at least one lipidoid component.

100. The pharmaceutical composition of claim 99, wherein the at least one lipidoid component is selected from 3-C12-OH, 3-C12-OH-cat, or 3-C12-C3-OH.

101. The pharmaceutical composition of claims 93 to 96, wherein the at least one artificial nucleic acid, preferably the RNA is formulated in lipid-based carriers.

102. The pharmaceutical composition of claim 101, wherein the lipid-based carriers are selected from liposomes, lipid nanoparticles, lipoplexes, solid lipid nanoparticles, lipo-polylexes, and/or nanoliposomes.

103. The pharmaceutical composition of claim 101 or 102, wherein the lipid-based carriers are lipid nanoparticles, preferably wherein the lipid nanoparticles encapsulate the artificial nucleic acid.

104. The pharmaceutical composition of claims 101 to 103, wherein the lipid-based carriers comprise at least one aggregation-reducing lipid, at least one cationic lipid or ionizable lipid, at least one neutral lipid or phospholipid, and at least one steroid or steroid analog.

105. The pharmaceutical composition of claim 104, wherein the aggregation reducing lipid is selected from a polymer conjugated lipid.

106. The pharmaceutical composition of claim 105, wherein the polymer conjugated lipid is selected from a PEG-conjugated lipid or a PEG-free lipid.

107. The pharmaceutical composition of claim 105 or 106, wherein the polymer conjugated lipid is selected or derived from DMG-PEG 2000, C10-PEG2K, Cer8-PEG2K, POZ-lipid, or ALC-0159.

108. The pharmaceutical composition of claims 105 to 107, wherein the polymer conjugated lipid is a PEG-free lipid selected from a POZ-lipid.

109. The pharmaceutical composition of claims 104 to 108, wherein the cationic lipid or ionizable lipid is selected from an amino lipid, preferably wherein the amino lipid comprises a tertiary amine group.

110. The pharmaceutical composition of claims 104 to 109, wherein the at least one cationic or ionizable lipid is a lipid selected or derived from formula (III-1) [chemical structure]
preferably, wherein one of L1 or L2 is —O(C═O)—, —(C═O)O—, —C(═O)—, —O—, —S(O)x-, —S—S—, —C(═O)S—, SC(═O)—, —NRaC(═O)—, —C(═O)NRa—, —NRaC(═O)NRa—, —OC(═O)NRa— or —NRaC(═O)O—, and the other of L1 or L2 is —O(C═O)—, —(C═O)O—, —C(═O)—, —O—, —S(O)x-, —S S—, —C(═O)S—, SC(═O)—, —NRaC(═O)—, —C(═O)NRa—, —NRaC(═O)NRa—, —OC(═O)NRa— or —NRaC(═O)O— or a direct bond; G1 and G2 are each independently unsubstituted C1-C12 alkylene or C1-C12 alkenylene; G3 is C1-C24 alkylene, C1-C24 alkenylene, C3-C8 cycloalkylene, C3-C8 cycloalkenylene; Ra is H or C1-C12 alkyl; R1 and R2 are each independently C6-C24 alkyl or C6-C24 alkenyl; R3 is H, OR5, CN, C(═O)OR4, OC(═O)R4 or —NR5C(═O)R4; R4 is C1-C12 alkyl; R5 is H or C1-C6 alkyl; and x is 0, 1 or 2.

111. The pharmaceutical composition of claims 104 to 110, wherein the at least one cationic or ionizable lipid is selected or derived from a lipid according to formula III-3:

[chemical structure]

112. The pharmaceutical composition of claims 101 to 111, wherein the lipid-based carriers comprise a cationic lipid selected or derived from ALC-0315, SM-102, SS-33/4PE-15, HEXA-C5DE-PipSS, or compound C26.

113. The pharmaceutical composition of claims 101 to 112, wherein the lipid-based carriers comprise a neutral lipid selected or derived from DSPC, DHPC, or DphyPE.

114. The pharmaceutical composition of claims 101 to 113, wherein the lipid-based carriers comprise a steroid or steroid analog selected or derived from cholesterol, cholesteryl hemisuccinate (CHEMS), preferably cholesterol.

115. The pharmaceutical composition of claims 101 to 114, wherein the lipid-based carriers comprise
(i) at least one cationic lipid, preferably as defined in claims 109 to 112;
(ii) at least one neutral lipid, preferably as defined in claim 113;
(iii) at least one steroid or steroid analogue, preferably as defined in claim 114; and
(iv) at least one aggregation reducing lipid, preferably as defined in claims 105 to 108.

116. The pharmaceutical composition of claims 101 to 115, wherein the lipid-based carriers comprise
(i) at least one cationic lipid selected from ALC-0315;
(ii) at least one neutral lipid selected from DSPC;
(iii) at least one steroid or steroid analogue selected from cholesterol; and
(iv) at least one aggregation reducing lipid selected from ALC-0159.

117. The pharmaceutical composition of claims 101 to 115, wherein the lipid-based carriers comprise
(i) at least one cationic lipid selected from SM-102;
(ii) at least one neutral lipid selected from DSPC;
(iii) at least one steroid or steroid analogue selected from cholesterol; and
(iv) at least one aggregation reducing lipid selected from DMG-PEG 2000.

118. The pharmaceutical composition of claims 101 to 117, wherein the lipid-based carriers comprise about 20-60% cationic lipid, about 5-25% neutral lipid, about 25-55% steroid or steroid analogue, and about 0.5-15% aggregation reducing lipid.

119. The pharmaceutical composition of claims 101 to 118, wherein the wt/wt ratio of lipid to nucleic acid in the lipid-based carrier is from about 10:1 to about 60:1, preferably from about 20:1 to about 30:1.

120. The pharmaceutical composition of claims 101 to 119, wherein the N/P ratio of the lipid-based carriers encapsulating the nucleic acid, preferably the RNA is in a range from about 1 to about 10, preferably in a range from about 5 to about 7.

121. The pharmaceutical composition of claims 101 to 120, wherein the lipid-based carriers have a Z-average size in a range of about 50 nm to about 120 nm.

122. The pharmaceutical composition of claims 93 to 122, additionally comprising at least one antagonist of at least one RNA sensing pattern recognition receptor selected from a Toll-like receptor, preferably a TLR7 antagonist and/or a TLR8 antagonist.

123. The pharmaceutical composition of claims 93 to 123, additionally comprising at least one small molecule inhibitor an inhibitory nucleic acid (siRNA) of the RUNX target transcription factor, preferably a small molecule inhibitor of RUNX or an inhibitory nucleic acid (siRNA) of RUNX.

124. The pharmaceutical composition of claims 93 to 124, wherein the composition is a liquid composition or a dried composition.

125. The pharmaceutical composition or the artificial nucleic acid of any one of the preceding claims, wherein upon intramuscular, intranasal, transdermal, intradermal, intralesional, intracranial, subcutaneous, intracardial, intratumoral, intravenous, intrapulmonal, intraarticular, sublingual, pulmonary, intrathecal, or ocular administration of the composition or nucleic acid to a cell, tissue, or subject, the RUNX transcription factor inhibitor is produced.

126. The pharmaceutical composition or the artificial nucleic acid of any one of the preceding claims, wherein upon local administration of the composition or artificial nucleic acid to a cell, tissue, or subject, the RUNX transcription factor inhibitor is produced.

127. The pharmaceutical composition or the artificial nucleic acid of claim 125 or 126, wherein the administration is an ocular administration.

128. The pharmaceutical composition or the artificial nucleic acid of claim 127, wherein the ocular administration is selected from topical, intravitreal, intracameral, subconjunctival, subretinal, subtenon, retrobulbar, topical, orbital, suprachoroidal, posterior juxtascleral, or intraoperative administration.

129. The pharmaceutical composition or the artificial nucleic acid of claim 127 or 128, wherein the ocular administration is intravitreal or intraoperative administration.

130. The pharmaceutical composition or the artificial nucleic acid of any one of the preceding claims, wherein the administration is performed into a tamponade agent-filled human eye.

131. The pharmaceutical composition or the artificial nucleic acid of claim 130, wherein the tamponade agent is a gas agent or a silicone agent.

132. The pharmaceutical composition or the artificial nucleic acid of any one of the preceding claims, wherein the ocular administration is performed using lipid-based carriers, preferably lipid nanoparticles (LNPs) comprising lipids as defined in claim 116 or 117.

133. The pharmaceutical composition or the artificial nucleic acid of any one of the preceding claims, wherein ocular administration of the composition or the nucleic acid leads to a production of the RUNX transcription factor inhibitor in cells and/or tissues of the eye, preferably in cells and/or tissues selected from cornea, lens, ciliary body, vitreous, sclera, choroid, retina, optic nerve, macula, scleral cells, choroid plexus epithelial cells, retinal cells, inflammatory cells, retinal pigment epithelium (RPE), Bruch's membrane, and retinal or choroidal blood vessels.

134. The pharmaceutical composition or the artificial nucleic acid of any one of the preceding claims, wherein ocular administration of the composition or the nucleic acid leads to a production of the RUNX transcription factor inhibitor in retinal pigment epithelial (RPE) cells or cells derived from them.

135. The pharmaceutical composition or the artificial nucleic acid of any one of the preceding claims, wherein ocular administration of the composition or the nucleic acid leads to a production of the RUNX transcription factor inhibitor in retinal cells selected from photoreceptor cells, bipolar cells, ganglion cells, horizontal cells, Muller cells, mural cells, microglia, and amacrine cells.

136. A pharmaceutical composition comprising at least one RNA encoding a therapeutic protein formulated in a lipid nanoparticle (LNP), wherein the LNP comprise an aggregation reducing lipid, a cationic lipid selected or derived from formula (III), a neutral lipid or phospholipid and a steroid or steroid analog, for use in treatment or prevention of an ophthalmic disease, disorder or condition, wherein said composition is administered via intravitreal administration to a subject in need thereof.

137. A Kit or kit of parts comprising at least one artificial nucleic acid of any one of claims 1 to 92, and/or at least one pharmaceutical composition of any one of claims 93 to 135, optionally comprising a liquid vehicle for solubilising, and optionally comprising technical instructions providing information on administration and dosage of the components.

138. An artificial nucleic acid of any one of claims 1 to 92, or a pharmaceutical composition of any one of claims 93 to 135, or a kit or kit of parts of claim 137, for use as a medicament in treating or preventing a disease, disorder, or condition in a subject.

139. An artificial nucleic acid of any one of claims 1 to 92, or a pharmaceutical composition of any one of claims 93 to 135, or a kit or kit of parts of claim 137, for use as a medicament in treating or preventing an ocular disease, disorder, or condition in a subject.

140. The artificial nucleic acid of any one of claims 1 to 92, or the pharmaceutical composition of any one of claims 93 to 135, or the kit or kit of parts of claim 137, for use as a medicament of claim 138 or 139, wherein the disease, disorder, or condition is associated with or caused by an overexpressed and/or an overactive RUNX transcription factor.

141. The artificial nucleic acid of any one of claims 1 to 92, or the pharmaceutical composition of any one of claims 93 to 135, or the kit or kit of parts of claim 137, for use as a medicament of claims 138 to 140, wherein the disease, disorder, or condition is associated with or caused by pathological epithelial to mesenchymal transition (EMT), pathological cell proliferation, aberrant angiogenesis, aberrant neovascularization, degeneration, fibrosis and/or solid tumors.

142. The artificial nucleic acid of any one of claims 1 to 92, or the pharmaceutical composition of any one of claims 93 to 135, or the kit or kit of parts of claim 137 for use as a medicament of claims 139 to 141, wherein the ocular disease, disorder, or condition is associated with or caused by aberrant proliferation or migration of retinal pigment epithelial (RPE) cells in a subject.

143. The artificial nucleic acid of any one of claims 1 to 92, or the pharmaceutical composition of any one of claims 93 to 135, or the kit or kit of parts of claim 137 for use as a medicament of claims 139 to 142, wherein the ocular disease, disorder, or condition is selected from proliferative diabetic retinopathy (PDR), macular edema, non-proliferative diabetic retinopathy, age-related macular degeneration, geographic atrophy, ocular neovascularization, retinopathy of prematurity (ROP), a retinal vein occlusion, ocular ischemic syndrome, neovascular glaucoma, a retinal hemangioma, Coats' disease, FEVR, or Norrie disease, persistent hyperplastic primary vitreous (PHPV), thyroid eye disease, epiretinal membrane, small vessel disease, or proliferative vitreoretinopathy (PVR).

144. The artificial nucleic acid of any one of claims 1 to 92, or the pharmaceutical composition of any one of claims 93 to 135, or the kit or kit of parts of claim 137 for use as a medicament of claims 138 to 143, wherein the ocular disease, disorder, or condition is PVR, preferably the prevention of PVR.

145. The artificial nucleic acid of any one of claims 1 to 92, or the pharmaceutical composition of any one of claims 93 to 135, or the kit or kit of parts of claim 137 for use as a medicament of claim 144, wherein cell proliferation and/or cell growth is reduced in eyes with PVR.

146. The artificial nucleic acid of any one of claims 1 to 92, or the pharmaceutical composition of any one of claims 93 to 135, or the kit or kit of parts of claim 137 for use as a medicament of claims 138 to 145, wherein the subject has suffered a trauma to the eye, comprises a retinal hole, a retinal tear, a retinal detachment disorder, or has undergone an ocular surgery.

147. The artificial nucleic acid of any one of claims 1 to 92, or the pharmaceutical composition of any one of claims 93 to 135, or the kit or kit of parts of claim 137 for use as a medicament of claim 146, wherein the retinal detachment disorder is selected from rhegmatogenous retinal detachment, exudative retinal detachment, or tractional retinal detachment.

148. The artificial nucleic acid of any one of claims 1 to 92, or the pharmaceutical composition of any one of claims 93 to 135, or the kit or kit of parts of claim 137 for use as a medicament of claims 138 to 147, wherein the use comprises administration of the artificial nucleic acid, the pharmaceutical composition, or the kit or kit of parts by local administration, preferably by ocular administration.

149. The artificial nucleic acid of any one of claims 1 to 92, or the pharmaceutical composition of any one of claims 93 to 135, or the kit or kit of parts of claim 137 for use as a medicament of claims 138 to 148, wherein the use comprises administration of the artificial nucleic acid, the pharmaceutical composition, or the kit or kit of parts by intravitreal administration, by administration prior to an ocular surgery, during an ocular surgery, or after an ocular surgery.

150. The artificial nucleic acid of any one of claims 1 to 92, or the pharmaceutical composition of any one of claims 93 to 135, or the kit or kit of parts of claim 137 for use as a medicament of claims 138 to 149, wherein the disease, disorder, or condition is associated with or caused by overexpressed and/or overactive RUNX, preferably RUNX1.

151. A method of treating or preventing a disease, disorder or condition, wherein the method comprises applying or administering to a subject in need thereof an effective amount of the artificial nucleic acid of any one of claims 1 to 92, or the pharmaceutical composition of any one of claims 93 to 135, or the kit or kit of parts of claim 137.

152. The method of treating or preventing a disease, disorder or condition of claim 151, wherein the disease, disorder, or condition is an ocular disease, disorder, or condition.

153. The method of treating or preventing a disease, disorder or condition of claim 151 or 152, wherein the disease, disorder, or condition is associated with or caused by an overexpressed and/or an overactive RUNX transcription factor.

154. The method of treating or preventing a disease, disorder or condition of claims 151 to 153, wherein the disease, disorder, or condition associated with or caused by pathological epithelial to mesenchymal transition (EMT), pathological cell proliferation, aberrant angiogenesis, aberrant neovascularization, degeneration, solid tumors, and/or fibrosis.

155. The method of treating or preventing a disease, disorder or condition of claims 151 to 154, wherein the ocular disease, disorder, or condition is associated with or caused by aberrant proliferation or migration of retinal pigment epithelial (RPE) cells in a subject.

156. The method of treating or preventing a disease, disorder or condition of claims 151 to 155, wherein the ocular disease, disorder, or condition is selected from proliferative diabetic retinopathy (PDR), macular edema, non-proliferative diabetic retinopathy, age-related macular degeneration, ocular neovascularization, retinopathy of prematurity (ROP), a retinal vein occlusion, ocular ischemic syndrome, neovascular glaucoma, a retinal hemangioma, Coats' disease, FEVR, or Norrie disease, persistent hyperplastic primary vitreous (PHPV), thyroid eye disease, epiretinal membrane, small vessel disease, or proliferative vitreoretinopathy (PVR).

157. The method of treating or preventing a disease, disorder or condition of claims 151 to 156, wherein the ocular disease, disorder, or condition is PVR, preferably the prevention of PVR.

158. The method of treating or preventing a disease, disorder or condition of claim 157, wherein cell proliferation and/or cell growth is reduced in eyes with PVR.

159. The method of treating or preventing a disease, disorder or condition of claims 151 to 158, wherein the subject has suffered a trauma to the eye, comprises a retinal hole, a retinal tear, a retinal detachment disorder, or has undergone an ocular surgery.

160. The method of treating or preventing a disease, disorder or condition of claim 159, wherein the retinal detachment disorder is selected from rhegmatogenous retinal detachment, exudative retinal detachment, or tractional retinal detachment.

161. The method of treating or preventing a disease, disorder or condition of claims 151 to 160, wherein the applying or administering is performed more than once, for example two times, three times, or four times, for example periodically.

162. The method of treating or preventing a disease, disorder or condition of claims 151 to 161, wherein the applying or administering is performed by local administration, preferably by ocular administration.

163. The method of treating or preventing a disease, disorder or condition of claims 151 to 162, wherein the applying or administering is performed by intravitreal administration, by administration prior to an ocular surgery, during an ocular surgery, and/or after an ocular surgery.

164. The method of treating or preventing a disease, disorder or condition of claims 151 to 163, wherein the disease, disorder, or condition is associated with or caused by overexpressed and/or overactive RUNX, preferably RUNX1.

165. A method of treating or preventing or preventing an ocular disease in a subject comprising, administering to the subject an effective amount of a composition comprising an artificial nucleic acid comprising at least one coding sequence encoding the RUNX inhibitor, the RUNX inhibitor comprising:
at least one amino acid element A selected or derived from CBFbeta configured to bind to the target transcription factor RUNX in the cytosol, preferably wherein element A is further characterized by any of claims 5 to 10; and
at least one amino acid element B selected or derived from SMMHC configured to trap the target transcription factor RUNX in the cytosol, preferably wherein element B is further characterized by any of claims 17 to 28.

166. The method of claim 165, wherein the composition is administered by ocular administration.

167. The method of claim 166, wherein the ocular administration is selected from intravitreal or intraoperative administration.

168. The method of claims 165 to 157, wherein the artificial nucleic acid is an mRNA as defined by any of claims 76 to 92.

169. The method of claims 165 to 157, wherein the artificial nucleic acid is comprised in a viral vector, preferably an AAV vector.

170. The method of claims 165 to 169, wherein the artificial nucleic acid is formulated in lipid-based carriers, preferably as defined by any of claims 101 to 121.

171. The method of claims 165 to 170, wherein the ocular disease is associated with or caused by overexpressed RUNX and/or overactive RUNX, preferably, wherein the ocular disease is PVR.

172. A method of reducing the activity of a RUNX transcription factor in a cell or a subject, wherein the method comprises
a) applying or administering an artificial nucleic acid comprising at least one coding sequence encoding at least one RUNX transcription factor inhibitor of claims 1 to 92; or
b) applying or administering a pharmaceutical composition comprising the artificial nucleic acid comprising at least one coding sequence encoding at least one RUNX transcription factor inhibitor of claims 93 to 135
to a cell, tissue, or subject, wherein the RUNX transcription factor inhibitor is produced in the cell, tissue, or subject after administration or application to said cell, tissue, or subject.

173. The method of claim 172, wherein the produced RUNX transcription factor inhibitor is a RUNX trap and the target transcription factor is RUNX.

174. The method of claim 173, wherein the produced RUNX transcription factor inhibitor or RUNX trap
sequesters cellular RUNX by binding to RUNX in the cytosol or sequesters cellular CBFbeta by binding to CBFbeta in the nucleus
reduces or prevents the interaction of cellular RUNX with cellular CBFbeta; and/or
reduces cellular RUNX-CBFbeta complex formation and/or activity; and/or
reduces the cellular expression of RUNX controlled or regulated gene products; and/or
reduces the cellular expression of TGFβ2, SMAD3, and/or COL1A1; and/or
reduces the cellular expression of RUNX; and/or
reduces or prevents pathological epithelial to mesenchymal transition (EMT), pathological cell proliferation, aberrant angiogenesis, aberrant neovascularization, degeneration, and/or fibrosis; and/or
reduces or prevents cell proliferation and/or cell growth in eyes with PVR.

175. The method of claims 172 to 174, wherein an ocular administration leads to a production of the RUNX transcription factor inhibitor in cells and/or tissues of the eye, preferably in retinal pigment epithelial (RPE) cells.

176. The method of claims 172 to 175, wherein the reduction of the activity of a RUNX transcription factor is a transient reduction of the activity of a RUNX transcription factor.

177. The method of claims 172 to 176, wherein the RUNX transcription factor inhibitor is a dominant negative inhibitor of the RUNX target transcription factor.

The application's sequence listing, which the Patent Office published only in electronic form, follows.

SEQUENCE LISTING (1582 sequences)

SEQ ID NO: 1 - DNA, 62 bp, Homo sapiens
  misc_feature 1..62: note = 5'-UTR of human peroxisomal multifunctional enzyme type 2 lacking the 5'-terminal oligopyrimidine tract (HSD17B4)
  source 1..62: mol_type = genomic DNA
gtcccgcagtcggcgtccagcggctctgcttgttcgtgtgtgtgtcgttgcaggccttattc

SEQ ID NO: 2 - RNA, 62 nt, Homo sapiens
  misc_feature 1..62: note = 5'-UTR of human peroxisomal multifunctional enzyme type 2 lacking the 5'-terminal oligopyrimidine tract (HSD17B4) mRNA
  source 1..62: mol_type = mRNA
gtcccgcagtcggcgtccagcggctctgcttgttcgtgtgtgtgtcgttgcaggccttattc

SEQ ID NO: 3 - DNA, 42 bp, Homo sapiens
  misc_feature 1..42: note = 5'-UTR of human ribosomal protein Large 32 lacking the 5'-terminal oligopyrimidine tract (RPL32, 32L4, 32L3)
  source 1..42: mol_type = genomic DNA
ggcgctgcctacggaggtggcagccatctccttctcggcatc

SEQ ID NO: 4 - RNA, 42 nt, Homo sapiens
  misc_feature 1..42: note = 5'-UTR of human ribosomal protein Large 32 lacking the 5'-terminal oligopyrimidine tract (RPL32, 32L4, 32L3) mRNA
  source 1..42: mol_type = mRNA
ggcgctgcctacggaggtggcagccatctccttctcggcatc

SEQ ID NO: 5 - DNA, 31 bp, Homo sapiens
  misc_feature 1..31: note = 5'-UTR of human androgen-induced gene 1 protein lacking the 5'-terminal oligopyrimidine tract (AIG1)
  source 1..31: mol_type = genomic DNA
gccgcccagccggtccaggcctctggcgaac

SEQ ID NO: 6 - RNA, 31 nt, Homo sapiens
  misc_feature 1..31: note = 5'-UTR of human androgen-induced gene 1 protein lacking the 5'-terminal oligopyrimidine tract (AIG1) mRNA
  source 1..31: mol_type = mRNA
gccgcccagccggtccaggcctctggcgaac

SEQ ID NO: 7 - DNA, 42 bp, Homo sapiens
  misc_feature 1..42: note = 5'-UTR of human acid ceramidase lacking the 5'-terminal oligopyrimidine tract (ASAH1)
  source 1..42: mol_type = genomic DNA
gcctctgctggagtccggggagtggcgttggctgctagagcg

SEQ ID NO: 8 - RNA, 42 nt, Homo sapiens
  misc_feature 1..42: note = 5'-UTR of human acid ceramidase lacking the 5'-terminal oligopyrimidine tract (ASAH1) mRNA
  source 1..42: mol_type = mRNA
gcctctgctggagtccggggagtggcgttggctgctagagcg

SEQ ID NO: 9 - DNA, 75 bp, Homo sapiens
  misc_feature 1..75: note = 5'-UTR of human mitochondrial ATP synthase subunit alpha lacking the 5'-terminal oligopyrimidine tract (ATP5A1)
  source 1..75: mol_type = genomic DNA
gcggctcggccattttgtcccagtcagtccggaggctgcggctgcagaagtaccgcctgcggagtaactgcaaag

SEQ ID NO: 10 - RNA, 75 nt, Homo sapiens
  misc_feature 1..75: note = 5'-UTR of human mitochondrial ATP synthase subunit alpha lacking the 5'-terminal oligopyrimidine tract (ATP5A1) mRNA
  source 1..75: mol_type = mRNA
gcggctcggccattttgtcccagtcagtccggaggctgcggctgcagaagtaccgcctgcggagtaactgcaaag

SEQ ID NO: 11 - DNA, 56 bp, Homo sapiens
  misc_feature 1..56: note = 5'-UTR of human cytochrome c oxidase subunit 6C lacking the 5'-terminal oligopyrimidine tract (COX6C)
  source 1..56: mol_type = genomic DNA
agtcaggaaggacgttggtgttgaggttagcatacgtatcaaggacagtaactacc

SEQ ID NO: 12 - RNA, 56 nt, Homo sapiens
  misc_feature 1..56: note = 5'-UTR of human cytochrome c oxidase subunit 6C lacking the 5'-terminal oligopyrimidine tract (COX6C) mRNA
  source 1..56: mol_type = mRNA
agtcaggaaggacgttggtgttgaggttagcatacgtatcaaggacagtaactacc

SEQ ID NO: 13 - DNA, 232 bp, Mus musculus
  misc_feature 1..232: note = 5'-UTR of mouse dihydropyrimidinase-like 2 (Dpysl2)
  source 1..232: mol_type = genomic DNA
ctctctccctctttcttttttccgccctagctggatctgtgttggaggagaggaaaagagacagaggattgcatctgttttgaaatctcctaatagcaagaccagttaagggattgtacctttttcctacaaatataaatatatatatattttaaaccaagtctttttttttccggctatctttgctttaaagctgtcctcttgagattacttcctcccgccccccggagag

SEQ ID NO: 14 - RNA, 232 nt, Mus musculus
  misc_feature 1..232: note = 5'-UTR of mouse dihydropyrimidinase-like 2 (Dpysl2) mRNA
  source 1..232: mol_type = mRNA
ctctctccctctttcttttttccgccctagctggatctgtgttggaggagaggaaaagagacagaggattgcatctgttttgaaatctcctaatagcaagaccagttaagggattgtacctttttcctacaaatataaatatatatatattttaaaccaagtctttttttttccggctatctttgctttaaagctgtcctcttgagattacttcctcccgccccccggagag

SEQ ID NO: 15 - DNA, 22 bp, Homo sapiens
  misc_feature 1..22: note = 5'-UTR of human ATP binding cassette subfamily B member 7 lacking the 5'-terminal oligopyrimidine tract (MDR, ABCB7)
  source 1..22: mol_type = genomic DNA
ggttcctctttcctcgctcaag

SEQ ID NO: 16 - RNA, 22 nt, Homo sapiens
  misc_feature 1..22: note = 5'-UTR of human ATP binding cassette subfamily B member 7 lacking the 5'-terminal oligopyrimidine tract (MDR, ABCB7) mRNA
  source 1..22: mol_type = mRNA
ggttcctctttcctcgctcaag

SEQ ID NO: 17 - DNA, 54 bp, Mus musculus
  misc_feature 1..54: note = 5'-UTR of mouse RIKEN cDNA 2010107E04 gene (Mp68, 2010107E04Rik)
  source 1..54: mol_type = genomic DNA
ctttcccattctgtagcagaatttggtgttgcctgtggtcttggtcccgcggag

SEQ ID NO: 18 - RNA, 54 nt, Mus musculus
  misc_feature 1..54: note = 5'-UTR of mouse RIKEN cDNA 2010107E04 gene (Mp68, 2010107E04Rik) mRNA
  source 1..54: mol_type = mRNA
ctttcccattctgtagcagaatttggtgttgcctgtggtcttggtcccgcggag

SEQ ID NO: 19 - DNA, 81 bp, Mus musculus
  misc_feature 1..81: note = 5'-UTR of mouse NADH dehydrogenase (ubiquinone) 1 alpha subcomplex, 4 (Ndufa4)
  source 1..81: mol_type = genomic DNA
gtccgctcagccaggttgcagaagcggcttagcgtgtgtcctaatcttctctctgcgtgtaggtaggcctgtgccgcaaac

SEQ ID NO: 20 - RNA, 81 nt, Mus musculus
  misc_feature 1..81: note = 5'-UTR of mouse NADH dehydrogenase (ubiquinone) 1 alpha subcomplex, 4 (Ndufa4) mRNA
  source 1..81: mol_type = mRNA
gtccgctcagccaggttgcagaagcggcttagcgtgtgtcctaatcttctctctgcgtgtaggtaggcctgtgccgcaaac

SEQ ID NO: 21 - DNA, 108 bp, Mus musculus
  misc_feature 1..108: note = 5'-UTR of mouse nitric oxide synthase interacting protein (Nosip)
  source 1..108: mol_type = genomic DNA
ctcctgtcgggcggaagtaggaggagtagagtttaaaaacagtactctttttccggttcgggacgtagttgaagcaacgacaagccggataaccgctcttgagacagg

SEQ ID NO: 22 - RNA, 108 nt, Mus musculus
  misc_feature 1..108: note = 5'-UTR of mouse nitric oxide synthase interacting protein (Nosip) mRNA
  source 1..108: mol_type = mRNA
ctcctgtcgggcggaagtaggaggagtagagtttaaaaacagtactctttttccggttcgggacgtagttgaagcaacgacaagccggataaccgctcttgagacagg

SEQ ID NO: 23 - DNA, 84 bp, Mus musculus
  misc_feature 1..84: note = 5'-UTR of mouse ribosomal protein L31 (Rpl31)
  source 1..84: mol_type = genomic DNA
cccgtgacccggaagttgtacggctacgcgactttccctcccacaaaccctcgcgcccttcctttcctacttgggcccggcaga

SEQ ID NO: 24 - RNA, 84 nt, Mus musculus
  misc_feature 1..84: note = 5'-UTR of mouse ribosomal protein L31 (Rpl31) mRNA
  source 1..84: mol_type = mRNA
cccgtgacccggaagttgtacggctacgcgactttccctcccacaaaccctcgcgcccttcctttcctacttgggcccggcaga

SEQ ID NO: 25 - DNA, 56 bp, Homo sapiens
  misc_feature 1..56: note = 5'-UTR of human 60S ribosomal protein L35a lacking the 5'-terminal oligopyrimidine tract (RPL35A)
  source 1..56: mol_type = genomic DNA
accgccatcttggctcctgtggaggcctgctgggaacgggacttctaaaaggaact

SEQ ID NO: 26 - RNA, 56 nt, Homo sapiens
  misc_feature 1..56: note = 5'-UTR of human 60S ribosomal protein L35a lacking the 5'-terminal oligopyrimidine tract (RPL35A) mRNA
  source 1..56: mol_type = mRNA
accgccatcttggctcctgtggaggcctgctgggaacgggacttctaaaaggaact

SEQ ID NO: 27 - DNA, 159 bp, Mus musculus
  misc_feature 1..159: note = 5'-UTR of mouse solute carrier family 7 (cationic amino acid transporter, y+ system), member 3 (Slc7a3)
  source 1..159: mol_type = genomic DNA
gggcgcttggcttgcaaggaccctgagctgcggcattgaagcacacccaacccaactcgactgaagtcagcctcactgaaccggatctgagaatcttctctctctgggcttgccagggctctccgaacctagctagcatcctcttcaattccaactaga

SEQ ID NO: 28 - RNA, 159 nt, Mus musculus
  misc_feature 1..159: note = 5'-UTR of mouse solute carrier family 7 (cationic amino acid transporter, y+ system), member 3 (Slc7a3) mRNA
  source 1..159: mol_type = mRNA
gggcgcttggcttgcaaggaccctgagctgcggcattgaagcacacccaacccaactcgactgaagtcagcctcactgaaccggatctgagaatcttctctctctgggcttgccagggctctccgaacctagctagcatcctcttcaattccaactaga

SEQ ID NO: 29 - DNA, 102 bp, Homo sapiens
  misc_feature 1..102: note = 5'-UTR of human tubulin beta 4B class Ivb (TUBB4B)
  source 1..102: mol_type = genomic DNA
atataagcgttggcggagcgtcggttgtagcactctgcgcgcccgctcttctgctgctgtttgtctacttcctcctgcttccccgccgccgccgccgccatc

SEQ ID NO: 30 - RNA, 102 nt, Homo sapiens
  misc_feature 1..102: note = 5'-UTR of human tubulin beta 4B class Ivb (TUBB4B) mRNA
  source 1..102: mol_type = mRNA
atataagcgttggcggagcgtcggttgtagcactctgcgcgcccgctcttctgctgctgtttgtctacttcctcctgcttccccgccgccgccgccgccatc

SEQ ID NO: 31 - DNA, 222 bp, Mus musculus
  misc_feature 1..222: note = 5'-UTR of mouse ubiquilin 2 (Ubqln2)
  source 1..222: mol_type = genomic DNA
cggagacggcctgcaggacctgctctctcagccctcagccgaggcctacgccgagccgagtgcgcagccgacgaccgggaggagccgcagccttcaactctgaggtactgtgatccgcgctgcccgccgggccgccccagtccgctgctgcggcacctccttccctcgcgccctcttcgctcgccagcgccttccctgtgagcctgcgtcaccgcggccgcc

SEQ ID NO: 32 - RNA, 222 nt, Mus musculus
  misc_feature 1..222: note = 5'-UTR of mouse ubiquilin 2 (Ubqln2) mRNA
  source 1..222: mol_type = mRNA
cggagacggcctgcaggacctgctctctcagccctcagccgaggcctacgccgagccgagtgcgcagccgacgaccgggaggagccgcagccttcaactctgaggtactgtgatccgcgctgcccgccgggccgccccagtccgctgctgcggcacctccttccctcgcgccctcttcgctcgccagcgccttccctgtgagcctgcgtcaccgcggccgcc

SEQ ID NO: 33 - DNA, 57 bp, synthetic construct
  misc_feature 1..57: note = synthetic-v1 5'-UTR
  source 1..57: mol_type = other DNA
gggaaataagagagaaaagaagagtaagaagaaatataagaccccggcgccgccacc

SEQ ID NO: 34 - RNA, 57 nt, synthetic construct
  misc_feature 1..57: note = synthetic-v1 5'-UTR mRNA
  source 1..57: mol_type = other RNA
gggaaataagagagaaaagaagagtaagaagaaatataagaccccggcgccgccacc

SEQ ID NO: 35 - DNA, 57 bp, synthetic construct
  misc_feature 1..57: note = synthetic-v2 5'-UTR
  source 1..57: mol_type = other DNA
aggagataagagagaaaagaagagtaagaagaaatataagaccccggcgccgccacc

SEQ ID NO: 36 - RNA, 57 nt, synthetic construct
  misc_feature 1..57: note = synthetic-v2 5'-UTR mRNA
  source 1..57: mol_type = other RNA
aggagataagagagaaaagaagagtaagaagaaatataagaccccggcgccgccacc

SEQ ID NO: 37 - DNA, 47 bp, synthetic construct
  misc_feature 1..47: note = synthetic-v3 5'-UTR
  source 1..47: mol_type = other DNA
gggaaataagagagaaaagaagagtaagaagaaatataagagccacc

SEQ ID NO: 38 - RNA, 47 nt, synthetic construct
  misc_feature 1..47: note = synthetic-v3 5'-UTR mRNA
  source 1..47: mol_type = other RNA
gggaaataagagagaaaagaagagtaagaagaaatataagagccacc

SEQ ID NO: 39 - DNA, 47 bp, synthetic construct
  misc_feature 1..47: note = synthetic-v4 5'-UTR
  source 1..47: mol_type = other DNA
aggagataagagagaaaagaagagtaagaagaaatataagagccacc

SEQ ID NO: 40 - RNA, 47 nt, synthetic construct
  misc_feature 1..47: note = synthetic-v4 5'-UTR mRNA
  source 1..47: mol_type = other RNA
aggagataagagagaaaagaagagtaagaagaaatataagagccacc

SEQ ID NO: 41 - DNA, 54 bp, synthetic construct
  misc_feature 1..54: note = synthetic-v5 5'-UTR
  source 1..54: mol_type = other DNA
gggaaataagagagaaaagaagagtaagaagaaatataagaccccggcgccacc

SEQ ID NO: 42 - RNA, 54 nt, synthetic construct
  misc_feature 1..54: note = synthetic-v5 5'-UTR mRNA
  source 1..54: mol_type = other RNA
gggaaataagagagaaaagaagagtaagaagaaatataagaccccggcgccacc

SEQ ID NO: 43 - DNA, 54 bp, synthetic construct
  misc_feature 1..54: note = synthetic-v6 5'-UTR
  source 1..54: mol_type = other DNA
aggagataagagagaaaagaagagtaagaagaaatataagaccccggcgccacc

SEQ ID NO: 44 - RNA, 54 nt, synthetic construct
  misc_feature 1..54: note = synthetic-v6 5'-UTR mRNA
  source 1..54: mol_type = other RNA
aggagataagagagaaaagaagagtaagaagaaatataagaccccggcgccacc

SEQ ID NO: 45 - DNA, 67 bp, synthetic construct
  misc_feature 1..67: note = synthetic-v7 5'-UTR
  source 1..67: mol_type = other DNA
gggaaataagagagaaaagaagagtaagaagaaatataagagcgccccgcggcgccccgcggccacc

SEQ ID NO: 46 - RNA, 67 nt, synthetic construct
  misc_feature 1..67: note = synthetic-v7 5'-UTR mRNA
  source 1..67: mol_type = other RNA
gggaaataagagagaaaagaagagtaagaagaaatataagagcgccccgcggcgccccgcggccacc

SEQ ID NO: 47 - DNA, 67 bp, synthetic construct
  misc_feature 1..67: note = synthetic-v8 5'-UTR
  source 1..67: mol_type = other DNA
aggagataagagagaaaagaagagtaagaagaaatataagagcgccccgcggcgccccgcggccacc

SEQ ID NO: 48 - RNA, 67 nt, synthetic construct
  misc_feature 1..67: note = synthetic-v8 5'-UTR mRNA
  source 1..67: mol_type = other RNA
aggagataagagagaaaagaagagtaagaagaaatataagagcgccccgcggcgccccgcggccacc

SEQ ID NO: 49 - DNA, 53 bp, synthetic construct
  misc_feature 1..53: note = HBA1-v1 5'-UTR
  source 1..53: mol_type = other DNA
agaataaactagtattcttctggtccccacagactcagagagaacccgccacc

SEQ ID NO: 50 - RNA, 53 nt, synthetic construct
  misc_feature 1..53: note = HBA1-v1 5'-UTR mRNA
  source 1..53: mol_type = other RNA
agaataaactagtattcttctggtccccacagactcagagagaacccgccacc

SEQ ID NO: 51 - DNA, 56 bp, synthetic construct
  misc_feature 1..56: note = HBA1-v2 5'-UTR
  source 1..56: mol_type = other DNA
aggagaataaactagtattcttctggtccccacagactcagagagaacccgccacc

SEQ ID NO: 52 - RNA, 56 nt, synthetic construct
  misc_feature 1..56: note = HBA1-v2 5'-UTR mRNA
  source 1..56: mol_type = other RNA
aggagaataaactagtattcttctggtccccacagactcagagagaacccgccacc

SEQ ID NO: 53 - DNA, 53 bp, synthetic construct
  misc_feature 1..53: note = HBA1-v3 5'-UTR
  source 1..53: mol_type = other DNA
aggagaaactagtattcttctggtccccacagactcagagagaacccgccacc

SEQ ID NO: 54 - RNA, 53 nt, synthetic construct
  misc_feature 1..53: note = HBA1-v3 5'-UTR mRNA
  source 1..53: mol_type = other RNA
aggagaaactagtattcttctggtccccacagactcagagagaacccgccacc

SEQ ID NO: 55 - DNA, 53 bp, synthetic construct
  misc_feature 1..53: note = HBA1-v4 5'-UTR
  source 1..53: mol_type = other DNA
agattaaactagtattcttctggtccccacagactcagagagaacccgccacc

SEQ ID NO: 56 - RNA, 53 nt, synthetic construct
  misc_feature 1..53: note = HBA1-v4 5'-UTR mRNA
  source 1..53: mol_type = other RNA
agattaaactagtattcttctggtccccacagactcagagagaacccgccacc

SEQ ID NO: 57 - DNA, 52 bp, synthetic construct
  misc_feature 1..52: note = HBA1-v5 5'-UTR
  source 1..52: mol_type = other DNA
agacgaactagtattcttctggtccccacagactcagagagaacccgccacc

SEQ ID NO: 58 - RNA, 52 nt, synthetic construct
  misc_feature 1..52: note = HBA1-v5 5'-UTR mRNA
  source 1..52: mol_type = other RNA
agacgaactagtattcttctggtccccacagactcagagagaacccgccacc

SEQ ID NO: 59 - DNA, 52 bp, synthetic construct
  misc_feature 1..52: note = HBA1-v6 5'-UTR
  source 1..52: mol_type = other DNA
gggcgaactagtattcttctggtccccacagactcagagagaacccgccacc

SEQ ID NO: 60 - RNA, 52 nt, synthetic construct
  misc_feature 1..52: note = HBA1-v6 5'-UTR mRNA
  source 1..52: mol_type = other RNA
gggcgaactagtattcttctggtccccacagactcagagagaacccgccacc

SEQ ID NO: 61 - DNA, 140 bp, synthetic construct
  misc_feature 1..140: note = HHV5-v1 5'-UTR
  source 1..140: mol_type = other DNA
ggacagatcgcctggagacgccatccacgctgttttgacctccatagaagacaccgggaccgatccagcctccgcggccgggaacggtgcattggaacgcggattccccgtgccaagagtgactcaccgtccttgacacg

SEQ ID NO: 62 - RNA, 140 nt, synthetic construct
  misc_feature 1..140: note = HHV5-v1 5'-UTR mRNA
  source 1..140: mol_type = other RNA
ggacagatcgcctggagacgccatccacgctgttttgacctccatagaagacaccgggaccgatccagcctccgcggccgggaacggtgcattggaacgcggattccccgtgccaagagtgactcaccgtccttgacacg

SEQ ID NO: 63 - DNA, 143 bp, synthetic construct
  misc_feature 1..143: note = HHV5-v1 5'-UTR
  source 1..143: mol_type = other DNA
aggagacagatcgcctggagacgccatccacgctgttttgacctccatagaagacaccgggaccgatccagcctccgcggccgggaacggtgcattggaacgcggattccccgtgccaagagtgactcaccgtccttgacacg

SEQ ID NO: 64 - RNA, 143 nt, synthetic construct
  misc_feature 1..143: note = HHV5-v1 5'-UTR mRNA
  source 1..143: mol_type = other RNA
aggagacagatcgcctggagacgccatccacgctgttttgacctccatagaagacaccgggaccgatccagcctccgcggccgggaacggtgcattggaacgcggattccccgtgccaagagtgactcaccgtccttgacacg

SEQ ID NO: 65 - DNA, 77 bp, synthetic construct
  misc_feature 1..77: note = HSD17B4-v2 5'-UTR
  source 1..77: mol_type = other DNA
aggagagtcccgcagtcggcgtccagcggctctgcttgttcgtgtgtgtgtcgttgcaggccttattcaagcttacc

SEQ ID NO: 66 - RNA, 77 nt, synthetic construct
  misc_feature 1..77: note = HSD17B4-v2 5'-UTR mRNA
  source 1..77: mol_type = other RNA
aggagagtcccgcagtcggcgtccagcggctctgcttgttcgtgtgtgtgtcgttgcaggccttattcaagcttacc

SEQ ID NO: 67 - DNA, 57 bp, Homo sapiens
  misc_feature 1..57: note = 3'-UTR of human proteasome subunit beta 3 (PSMB3)
  source 1..57: mol_type = genomic DNA
ccctgttcccagagcccacttttttttctttttttgaaataaaatagcctgtctttc

SEQ ID NO: 68 - RNA, 57 nt, Homo sapiens
  misc_feature 1..57: note = 3'-UTR of human proteasome subunit beta 3 (PSMB3) mRNA
  source 1..57: mol_type = mRNA
ccctgttcccagagcccacttttttttctttttttgaaataaaatagcctgtctttc

SEQ ID NO: 69 - DNA, 44 bp, Homo sapiens
  misc_feature 1..44: note = Center, alpha-complex-binding portion of the 3'-UTR of an alpha-globin gene (muag)
  source 1..44: mol_type = genomic DNA
gcccgatgggcctcccaacgggccctcctcccctccttgcaccg

SEQ ID NO: 70 - RNA, 44 nt, Homo sapiens
  misc_feature 1..44: note = Center, alpha-complex-binding portion of the 3'-UTR of an alpha-globin gene (muag) mRNA
  source 1..44: mol_type = mRNA
gcccgatgggcctcccaacgggccctcctcccctccttgcaccg

SEQ ID NO: 71 - DNA, 187 bp, Homo sapiens
  misc_feature 1..187: note = 3'-UTR ALB7
  source 1..187: mol_type = genomic DNA
gcatcacatttaaaagcatctcagcctaccatgagaataagagaaagaaaatgaagatcaatagcttattcatctctttttctttttcgttggtgtaaagccaacaccctgtctaaaaaacataaatttctttaatcattttgcctcttttctctgtgcttcaattaataaaaaatggaaagaacct

SEQ ID NO: 72 - RNA, 187 nt, Homo sapiens
  misc_feature 1..187: note = 3'-UTR ALB7 mRNA
  source 1..187: mol_type = mRNA
gcatcacatttaaaagcatctcagcctaccatgagaataagagaaagaaaatgaagatcaatagcttattcatctctttttctttttcgttggtgtaaagccaacaccctgtctaaaaaacataaatttctttaatcattttgcctcttttctctgtgcttcaattaataaaaaatggaaagaacct

SEQ ID NO: 73 - DNA, 266 bp, Homo sapiens
  misc_feature 1..266: note = 3'-UTR of human annexin A4 (ANXA4)
  source 1..266: mol_type = genomic DNA
aataaaaatcccagaaggacaggaggattctcaacactttgaatttttttaacttcatttttctacactgctattatcattatctcagaatgcttatttccaattaaaacgcctacagctgcctcctagaatatagactgtctgtattattattcacctataattagtcattatgatgctttaaagctgtacttgcatttcaaagcttataagatataaatggagattttaaagtagaaataaatatgtattccatgtttttaaaa

SEQ ID NO: 74 - RNA, 266 nt, Homo sapiens
  misc_feature 1..266: note = 3'-UTR of human annexin A4 (ANXA4) mRNA
  source 1..266: mol_type = mRNA
aataaaaatcccagaaggacaggaggattctcaacactttgaatttttttaacttcatttttctacactgctattatcattatctcagaatgcttatttccaattaaaacgcctacagctgcctcctagaatatagactgtctgtattattattcacctataattagtcattatgatgctttaaagctgtacttgcatttcaaagcttataagatataaatggagattttaaagtagaaataaatatgtattccatgtttttaaaa

SEQ ID NO: 75 - DNA, 121 bp, Homo sapiens
  misc_feature 1..121: note = 3'-UTR of human caspase 1 (CASP1)
  source 1..121: mol_type = genomic DNA
aataaggaaactgtatgaatgtctgtgggcaggaagtgaagagatccttctgtaaaggtttttggaattatgtctgctgaataataaacttttttgaaataataaatctggtagaaaaatg

SEQ ID NO: 76 - RNA, 121 nt, Homo sapiens
  misc_feature 1..121: note = 3'-UTR of human caspase 1 (CASP1) mRNA
  source 1..121: mol_type = mRNA
aataaggaaactgtatgaatgtctgtgggcaggaagtgaagagatccttctgtaaaggtttttggaattatgtctgctgaataataaacttttttgaaataataaatctggtagaaaaatg

SEQ ID NO: 77 - DNA, 137 bp, Homo sapiens
  misc_feature 1..137: note = 3'-UTR of human cytochrome c oxidase subunit 6B1 (COX6B1)
  source 1..137: mol_type = genomic DNA
actggctgcatctccctttcctctgtcctccatccttctcccaggatggtgaagggggacctggtacccagtgatccccaccccaggatcctaaatcatgacttacctgctaataaaaactcattggaaaagtgaga

SEQ ID NO: 78 - RNA, 137 nt, Homo sapiens
  misc_feature 1..137: note = 3'-UTR of human cytochrome c oxidase subunit 6B1 (COX6B1) mRNA
  source 1..137: mol_type = mRNA
actggctgcatctccctttcctctgtcctccatccttctcccaggatggtgaagggggacctggtacccagtgatccccaccccaggatcctaaatcatgacttacctgctaataaaaactcattggaaaagtgaga

SEQ ID NO: 79 - DNA, 166 bp, Homo sapiens
  misc_feature 1..166: note = 3'-UTR of human FIG4 phosphoinositide 5-phosphatase (FIG4)
  source 1..166: mol_type = genomic DNA
aaagagcgcaggtccacctggtggacacgtctgattagcttagaacctgtcttgtctcatcttcaaaaggtaacttattaaaagtcctttgcgtctgaagcctttctccttttctgtcacttgcaaattccaaattatagctaataaagatgactagataatttgc

SEQ ID NO: 80 - RNA, 166 nt, Homo sapiens
  misc_feature 1..166: note = 3'-UTR of human FIG4 phosphoinositide 5-phosphatase (FIG4) mRNA
  source 1..166: mol_type = mRNA
aaagagcgcaggtccacctggtggacacgtctgattagcttagaacctgtcttgtctcatcttcaaaaggtaacttattaaaagtcctttgcgtctgaagcctttctccttttctgtcacttgcaaattccaaattatagctaataaagatgactagataatttgc

SEQ ID NO: 81 - DNA, 353 bp, Mus musculus
  misc_feature 1..353: note = 3'-UTR of mouse GNAS (guanine nucleotide binding protein, alpha stimulating) complex locus (Gnas)
  source 1..353: mol_type = genomic DNA
gaagggaacacccaaatttaattcagccttaagcacaattaattaagagtgaaacgtaattgtacaagcagttggtcacccaccatagggcatgatcaacaccgcaacctttcctttttcccccagtgattctgaaaaacccctcttcccttcagcttgcttagatgttccaaatttagtaagcttaaggcggcctacagaagaaaaagaaaaaaaaggccacaaaagttccctctcactttcagtaaataaaataaaagcagcaacagaaataaagaaataaatgaaattcaaaatgaaataaatattgtgttgtgcagcattaaaaaatcaataaaaattaaaaatgagca

SEQ ID NO: 82 - RNA, 353 nt, Mus musculus
  misc_feature 1..353: note = 3'-UTR of mouse GNAS (guanine nucleotide binding protein, alpha stimulating) complex locus (Gnas) mRNA
  source 1..353: mol_type = mRNA
gaagggaacacccaaatttaattcagccttaagcacaattaattaagagtgaaacgtaattgtacaagcagttggtcacccaccatagggcatgatcaacaccgcaacctttcctttttcccccagtgattctgaaaaacccctcttcccttcagcttgcttagatgttccaaatttagtaagcttaaggcggcctacagaagaaaaagaaaaaaaaggccacaaaagttccctctcactttcagtaaataaaataaaagcagcaacagaaataaagaaataaatgaaattcaaaatgaaataaatattgtgttgtgcagcattaaaaaatcaataaaaattaaaaatgagca

SEQ ID NO: 83 - DNA, 133 bp, Mus musculus
  misc_feature 1..133: note = 3'-UTR of mouse NADH dehydrogenase (ubiquinone) 1 alpha subcomplex, 1 (Ndufa1)
  source 1..133: mol_type = genomic DNA
ggaagcattttcctggctgattaaaagaaattactcagctatggtcatctgttcctgttagaaggctatgcagcatattatatactatgcgcatgttatgaaatgcataataaaaaattttaaaaaatctaaa

SEQ ID NO: 84 - RNA, 133 nt, Mus musculus
  misc_feature 1..133: note = 3'-UTR of mouse NADH dehydrogenase (ubiquinone) 1 alpha subcomplex, 1 (Ndufa1) mRNA
  source 1..133: mol_type = mRNA
ggaagcattttcctggctgattaaaagaaattactcagctatggtcatctgttcctgttagaaggctatgcagcatattatatactatgcgcatgttatgaaatgcataataaaaaattttaaaaaatctaaa

SEQ ID NO: 85 - DNA, 70 bp, Homo sapiens
  misc_feature 1..70: note = 3'-UTR of human ribosomal protein S9 (RPS9)
  source 1..70: mol_type = genomic DNA
gtccacctgtccctcctgggctgctggattgtctcgttttcctgccaaataaacaggatcagcgctttac

SEQ ID NO: 86 - RNA, 70 nt, Homo sapiens
  misc_feature 1..70: note = 3'-UTR of human ribosomal protein S9 (RPS9) mRNA
  source 1..70: mol_type = mRNA
gtccacctgtccctcctgggctgctggattgtctcgttttcctgccaaataaacaggatcagcgctttac

SEQ ID NO: 87 - DNA, 240 bp, Mus musculus
  misc_feature 1..240: note = 3'-UTR of mouse solute carrier family 7 (cationic amino acid transporter, y+ system), member 3 (Slc7a3)
  source 1..240: mol_type = genomic DNA
cctaaccatacctaattgttgtcttgttctcctatacaataatggagagtactcttgaccccacgaagagctgggcctctcatgtggtgttagtgacggatatgaaataatgctctgtatttcttgtgaaatgatggctatgtctttgctgtttctcatttgtttttaacttgtatactttgaaatagtctctgtagttgtttcctggctttgaaaaaaatgttattaaaggaaaattgt

SEQ ID NO: 88 - RNA, 240 nt, Mus musculus
  misc_feature 1..240: note = 3'-UTR of mouse solute carrier family 7 (cationic amino acid transporter, y+ system), member 3 (Slc7a3) mRNA
  source 1..240: mol_type = mRNA
cctaaccatacctaattgttgtcttgttctcctatacaataatggagagtactcttgaccccacgaagagctgggcctctcatgtggtgttagtgacggatatgaaataatgctctgtatttcttgtgaaatgatggctatgtctttgctgtttctcatttgtttttaacttgtatactttgaaatagtctctgtagttgtttcctggctttgaaaaaaatgttattaaaggaaaattgt

SEQ ID NO: 89 - DNA, 151 bp, Homo sapiens
  misc_feature 1..151: note = 3'-UTR of human tubulin beta 4B class Ivb (TUBB4B)
  source 1..151: mol_type = genomic DNA
agccttcagtcactggggaaagcagggaagcagtgtgaactctttattcactcccagcctgtcctgtggcctgtcccactgtgtgcacttgctgttttccctgtccacatccatgctgtacagacaccaccattaaagcattttcatagtg

SEQ ID NO: 90 - RNA, 151 nt, Homo sapiens
  misc_feature 1..151: note = 3'-UTR of human tubulin beta 4B class Ivb (TUBB4B) mRNA
  source 1..151: mol_type = mRNA
agccttcagtcactggggaaagcagggaagcagtgtgaactctttattcactcccagcctgtcctgtggcctgtcccactgtgtgcacttgctgttttccctgtccacatccatgctgtacagacaccaccattaaagcattttcatagtg

SEQ ID NO: 91 - DNA, 119 bp, synthetic construct
  misc_feature 1..119: note = HBA1-v1 3'-UTR
  source 1..119: mol_type = other DNA
tgataataggctggagcctcggtggcctagcttcttgccccttgggcctccccccagcccctcctccccttcctgcacccgtacccccgtggtctttgaataaagtctgagtgggcggc

SEQ ID NO: 92 - RNA, 119 nt, synthetic construct
  misc_feature 1..119: note = HBA1-v1 3'-UTR mRNA
  source 1..119: mol_type = other RNA
tgataataggctggagcctcggtggcctagcttcttgccccttgggcctccccccagcccctcctccccttcctgcacccgtacccccgtggtctttgaataaagtctgagtgggcggc

SEQ ID NO: 93 - DNA, 119 bp, synthetic construct
  misc_feature 1..119: note = HBA1-v2 3'-UTR
  source 1..119: mol_type = other DNA
tgataataggctggagcctcggtggccatgcttcttgccccttgggcctccccccagcccctcctccccttcctgcacccgtacccccgtggtctttgaataaagtctgagtgggcggc

SEQ ID NO: 94 - RNA, 119 nt, synthetic construct
  misc_feature 1..119: note = HBA1-v2 3'-UTR mRNA
  source 1..119: mol_type = other RNA
tgataataggctggagcctcggtggccatgcttcttgccccttgggcctccccccagcccctcctccccttcctgcacccgtacccccgtggtctttgaataaagtctgagtgggcggc

SEQ ID NO: 95 - DNA, 110 bp, Homo sapiens
  misc_feature 1..110: note = HBA1-v3 3'-UTR
  source 1..110: mol_type = genomic DNA
gctggagcctcggtggccatgcttcttgccccttgggcctccccccagcccctcctccccttcctgcacccgtacccccgtggtctttgaataaagtctgagtgggcggc

SEQ ID NO: 96 - RNA, 110 nt, Homo sapiens
  misc_feature 1..110: note = HBA1-v3 3'-UTR mRNA
  source 1..110: mol_type = mRNA
gctggagcctcggtggccatgcttcttgccccttgggcctccccccagcccctcctccccttcctgcacccgtacccccgtggtctttgaataaagtctgagtgggcggc

SEQ ID NO: 97 - DNA, 108 bp, Homo sapiens
  misc_feature 1..108: note = HBA2 3'-UTR
  source 1..108: mol_type = genomic DNA
gctggagcctcggtagccgttcctcctgcccgctgggcctcccaacgggccctcctcccctccttgcaccggcccttcctggtctttgaataaagtctgagtgggcag

SEQ ID NO: 98 - RNA, 108 nt, Homo sapiens
  misc_feature 1..108: note = HBA2 3'-UTR mRNA
  source 1..108: mol_type = mRNA
gctggagcctcggtagccgttcctcctgcccgctgggcctcccaacgggccctcctcccctccttgcaccggcccttcctggtctttgaataaagtctgagtgggcag

SEQ ID NO: 99 - DNA, 132 bp, Homo sapiens
  misc_feature 1..132: note = HBB-v1 3'-UTR
  source 1..132: mol_type = genomic DNA
gctcgctttcttgctgtccaatttctattaaaggttcctttgttccctaagtccaactactaaactgggggatattatgaagggccttgagcatctggattctgcctaataaaaaacatttattttcattgc

SEQ ID NO: 100 - RNA, 132 nt, Homo sapiens
  misc_feature 1..132: note = HBB-v1 3'-UTR mRNA
  source 1..132: mol_type = mRNA
gctcgctttcttgctgtccaatttctattaaaggttcctttgttccctaagtccaactactaaactgggggatattatgaagggccttgagcatctggattctgcctaataaaaaacatttattttcattgc

SEQ ID NO: 101 - DNA, 311 bp, synthetic construct
  misc_feature 1..311: note = HBB-v2 3'-UTR
  source 1..311: mol_type = other DNA
ctcgagagctcgctttcttgctgtccaatttctattaaaggttcctttgttccctaagtccaactactaaactgggggatattatgaagggccttgagcatctggattctgcctaataaaaaacatttattttcattgctgcgtcgagagctcgctttcttgctgtccaatttctattaaaggttcctttgttccctaagtccaactactaaactgggggatattatgaagggccttgagcatctggattctgcctaataaaaaacatttattttcattgctgcgtcgagacctggtccagagtcgctagc

SEQ ID NO: 102 - RNA, 311 nt, synthetic construct
  misc_feature 1..311: note = HBB-v2 3'-UTR mRNA
  source 1..311: mol_type = other RNA
ctcgagagctcgctttcttgctgtccaatttctattaaaggttcctttgttccctaagtccaactactaaactgggggatattatgaagggccttgagcatctggattctgcctaataaaaaacatttattttcattgctgcgtcgagagctcgctttcttgctgtccaatttctattaaaggttcctttgttccctaagtccaactactaaactgggggatattatgaagggccttgagcatctggattctgcctaataaaaaacatttattttcattgctgcgtcgagacctggtccagagtcgctagc

SEQ ID NO: 103 - DNA, 295 bp, synthetic construct
  misc_feature 1..295: note = AES-12S-v1 3'-UTR
  source 1..295: mol_type = other DNA
ctcgagctggtactgcatgcacgcaatgctagctgcccctttcccgtcctgggtaccccgagtctcccccgacctcgggtcccaggtatgctcccacctccacctgccccactcaccacctctgctagttccagacacctcccaagcacgcagcaatgcagctcaaaacgcttagcctagccacacccccacgggaaacagcagtgattaacctttagcaataaacgaaagtttaactaagctatactaaccccagggttggtcaatttcgtgccagccacaccctggagctagc

SEQ ID NO: 104 - RNA, 295 nt, synthetic construct
  misc_feature 1..295: note = AES-12S-v1 3'-UTR mRNA
  source 1..295: mol_type = other RNA
ctcgagctggtactgcatgcacgcaatgctagctgcccctttcccgtcctgggtaccccgagtctcccccgacctcgggtcccaggtatgctcccacctccacctgccccactcaccacctctgctagttccagacacctcccaagcacgcagcaatgcagctcaaaacgcttagcctagccacacccccacgggaaacagcagtgattaacctttagcaataaacgaaagtttaactaagctatactaaccccagggttggtcaatttcgtgccagccacaccctggagctagc

SEQ ID NO: 105 - DNA, 317 bp, synthetic construct
  misc_feature 1..317: note = AES-12S-v2 3'-UTR
  source 1..317: mol_type = other DNA
ctcgagctggtactgcatgcacgcaatgctagctgcccctttcccgtcctgggtaccccgagtctcccccgacctcgggtcccaggtatgctcccacctccacctgccccactcaccacctctgctagttccagacacctcccaagcacgcagcaatgcagctcaaaacgcttagcctagccacacccccacgggaaacagcagtgattaacctttagcaataaacgaaagtttaactaagctatactaaccccagggttggtcaatttcgtgccagccacaccgagacctggtccagagtcgctagccgcgtcgct

SEQ ID NO: 106 - RNA, 317 nt, synthetic construct
  misc_feature 1..317: note = AES-12S-v2 3'-UTR mRNA
  source 1..317: mol_type = other RNA
ctcgagctggtactgcatgcacgcaatgctagctgcccctttcccgtcctgggtaccccgagtctcccccgacctcgggtcccaggtatgctcccacctccacctgccccactcaccacctctgctagttccagacacctcccaagcacgcagcaatgcagctcaaaacgcttagcctagccacacccccacgggaaacagcagtgattaacctttagcaataaacgaaagtttaactaagctatactaaccccagggttggtcaatttcgtgccagccacaccgagacctggtccagagtcgctagccgcgtcgct

SEQ ID NO: 107 - DNA, 105 bp, synthetic construct
  misc_feature 1..105: note = GH1-v1 3'-UTR
  source 1..105: mol_type = other DNA
cgggtggcatccctgtgacccctccccagtgcctctcctggccctggaagttgccactccagtgcccaccagccttgtcctaataaaattaagttgcatcaagct

SEQ ID NO: 108 - RNA, 105 nt, synthetic construct
  misc_feature 1..105: note = GH1-v1 3'-UTR mRNA
  source 1..105: mol_type = other RNA
cgggtggcatccctgtgacccctccccagtgcctctcctggccctggaagttgccactccagtgcccaccagccttgtcctaataaaattaagttgcatcaagct

SEQ ID NO: 109 - DNA, 95 bp, synthetic construct
  misc_feature 1..95: note = PSMB3-v2 3'-UTR
  source 1..95: mol_type = other DNA
ggactagtccctgttcccagagcccacttttttttctttttttgaaataaaatagcctgtctttcagatctcaaaggctcttttcagagccacca

SEQ ID NO: 110 - RNA, 95 nt, synthetic construct
  misc_feature 1..95: note = PSMB3-v2 3'-UTR mRNA
  source 1..95: mol_type = other RNA
ggactagtccctgttcccagagcccacttttttttctttttttgaaataaaatagcctgtctttcagatctcaaaggctcttttcagagccacca

SEQ ID NO: 111 - DNA, 71 bp, synthetic construct
  misc_feature 1..71: note = PSMB3-v3 3'-UTR
  source 1..71: mol_type = other DNA
ggactagtccctgttcccagagcccacttttttttctttttttgaaataaaatagcctgtctttcagatct

SEQ ID NO: 112 - RNA, 71 nt, synthetic construct
  misc_feature 1..71: note = PSMB3-v3 3'-UTR mRNA
  source 1..71: mol_type = other RNA
ggactagtccctgttcccagagcccacttttttttctttttttgaaataaaatagcctgtctttcagatct

SEQ ID NO: 113 - DNA, 195 bp, synthetic construct
  misc_feature 1..195: note = PSMB3-v4 3'-UTR
  source 1..195: mol_type = other DNA
ggactagtccctgttcccagagcccacttttttttctttttttgaaataaaatagcctgtctttcagatctcaaaggctcttttcagagccaccaaaaaaaaaaaaaaaaaaaaaaaaaaaaaaaaaaaaaaaaaaaaaaaaaaaaaaaaaaaaaaaaaaaaaaaaaaaaaaaaaaaaaaaaaaaaaaaaaaaaa

SEQ ID NO: 114 - RNA, 195 nt, synthetic construct
  misc_feature 1..195: note = PSMB3-v4 3'-UTR mRNA
  source 1..195: mol_type = other RNA
ggactagtccctgttcccagagcccacttttttttctttttttgaaataaaatagcctgtctttcagatctcaaaggctcttttcagagccaccaaaaaaaaaaaaaaaaaaaaaaaaaaaaaaaaaaaaaaaaaaaaaaaaaaaaaaaaaaaaaaaaaaaaaaaaaaaaaaaaaaaaaaaaaaaaaaaaaaaaa

SEQ ID NO: 115 - DNA, 171 bp, synthetic construct
  misc_feature 1..171: note = PSMB3-v5 3'-UTR
  source 1..171: mol_type = other DNA
ggactagtccctgttcccagagcccacttttttttctttttttgaaataaaatagcctgtctttcagatctaaaaaaaaaaaaaaaaaaaaaaaaaaaaaaaaaaaaaaaaaaaaaaaaaaaaaaaaaaaaaaaaaaaaaaaaaaaaaaaaaaaaaaaaaaaaaaaaaaaa

SEQ ID NO: 116 - RNA, 171 nt, synthetic construct
  misc_feature 1..171: note = PSMB3-v5 3'-UTR mRNA
  source 1..171: mol_type = other RNA
ggactagtccctgttcccagagcccacttttttttctttttttgaaataaaatagcctgtctttcagatctaaaaaaaaaaaaaaaaaaaaaaaaaaaaaaaaaaaaaaaaaaaaaaaaaaaaaaaaaaaaaaaaaaaaaaaaaaaaaaaaaaaaaaaaaaaaaaaaaaaa

SEQ ID NO: 117 - DNA, 200 bp, synthetic construct
  misc_feature 1..200: note = PSMB3-v6 3'-UTR
  source 1..200: mol_type = other DNA
ggactagtccctgttcccagagcccacttttttttctttttttgaaataaaatagcctgtctttcagatctcaaaggctcttttcagagccaccaaaaaaaaaaaaaaaaaaaaaaaaaaaaaaaaaaaaaaaaaaaaaaaaaaaaaaaaaaaaaaaaaaaaaaaaaaaaaaaaaaaaaaaaaaaaaaaaaaaaagaatt

SEQ ID NO: 118 - RNA, 200 nt, synthetic construct
  misc_feature 1..200: note = PSMB3-v6 3'-UTR mRNA
  source 1..200: mol_type = other RNA
ggactagtccctgttcccagagcccacttttttttctttttttgaaataaaatagcctgtctttcagatctcaaaggctcttttcagagccaccaaaaaaaaaaaaaaaaaaaaaaaaaaaaaaaaaaaaaaaaaaaaaaaaaaaaaaaaaaaaaaaaaaaaaaaaaaaaaaaaaaaaaaaaaaaaaaaaaaaaagaatt

SEQ ID NO: 119 - DNA, 176 bp, synthetic construct
  misc_feature 1..176: note = PSMB3-v7 3'-UTR
  source 1..176: mol_type = other DNA
ggactagtccctgttcccagagcccacttttttttctttttttgaaataaaatagcctgtctttcagatctaaaaaaaaaaaaaaaaaaaaaaaaaaaaaaaaaaaaaaaaaaaaaaaaaaaaaaaaaaaaaaaaaaaaaaaaaaaaaaaaaaaaaaaaaaaaaaaaaaaagaatt

SEQ ID NO: 120 - RNA, 176 nt, synthetic construct
  misc_feature 1..176: note = PSMB3-v7 3'-UTR mRNA
  source 1..176: mol_type = other RNA
ggactagtccctgttcccagagcccacttttttttctttttttgaaataaaatagcctgtctttcagatctaaaaaaaaaaaaaaaaaaaaaaaaaaaaaaaaaaaaaaaaaaaaaaaaaaaaaaaaaaaaaaaaaaaaaaaaaaaaaaaaaaaaaaaaaaaaaaaaaaaagaatt

SEQ ID NO: 121-127 - skipped (7 entries)

SEQ ID NO: 128 - DNA, 13 bp, synthetic construct
  misc_feature 1..13: note = Kozak sequence
  source 1..13: mol_type = other DNA
gccgccaccatgg

SEQ ID NO: 129 - RNA, 13 nt, synthetic construct
  misc_feature 1..13: note = Kozak sequence mRNA
  source 1..13: mol_type = other RNA
gccgccaccatgg

SEQ ID NO: 130-135 - skipped (6 entries)

SEQ ID NO: 136 - DNA, 24 bp, synthetic construct
  misc_feature 1..24: note = histone stem-loop sequence (histoneSL, hSL)
  source 1..24: mol_type = other DNA
caaaggctcttttcagagccacca

SEQ ID NO: 137 - RNA, 24 nt, synthetic construct
  misc_feature 1..24: note = histone stem-loop sequence (histoneSL, hSL) mRNA
  source 1..24: mol_type = other RNA
caaaggctcttttcagagccacca

SEQ ID NO: 138 - RNA, 128 nt, synthetic construct
  misc_feature 1..128: note = mRNA 3'-end A64-N5-C30-histoneSL-N5
  source 1..128: mol_type = other RNA
aaaaaaaaaaaaaaaaaaaaaaaaaaaaaaaaaaaaaaaaaaaaaaaaaaaaaaaaaaaaaaaatgcatcccccccccccccccccccccccccccccccaaaggctcttttcagagccaccagaatt

SEQ ID NO: 139 - RNA, 98 nt, synthetic construct
  misc_feature 1..98: note = mRNA 3'-end A64-N5-histoneSL-N5
  source 1..98: mol_type = other RNA
aaaaaaaaaaaaaaaaaaaaaaaaaaaaaaaaaaaaaaaaaaaaaaaaaaaaaaaaaaaaaaaatgcatcaaaggctcttttcagagccaccagaatt

SEQ ID NO: 140 - RNA, 129 nt, synthetic construct
  misc_feature 1..129: note = mRNA 3'-end histoneSL-A100-N5
  source 1..129: mol_type = other RNA
caaaggctcttttcagagccaccaaaaaaaaaaaaaaaaaaaaaaaaaaaaaaaaaaaaaaaaaaaaaaaaaaaaaaaaaaaaaaaaaaaaaaaaaaaaaaaaaaaaaaaaaaaaaaaaaaaaagaatt

SEQ ID NO: 141 - RNA, 93 nt, synthetic construct
  misc_feature 1..93: note = mRNA 3'-end histoneSL-A64-N5
  source 1..93: mol_type = other RNA
caaaggctcttttcagagccaccaaaaaaaaaaaaaaaaaaaaaaaaaaaaaaaaaaaaaaaaaaaaaaaaaaaaaaaaaaaaaaaaagaatt

SEQ ID NO: 142 - RNA, 105 nt, synthetic construct
  misc_feature 1..105: note = mRNA 3'-end A100-N5
  source 1..105: mol_type = other RNA
aaaaaaaaaaaaaaaaaaaaaaaaaaaaaaaaaaaaaaaaaaaaaaaaaaaaaaaaaaaaaaaaaaaaaaaaaaaaaaaaaaaaaaaaaaaaaaaaaaaagaatt

SEQ ID NO: 143 - RNA, 69 nt, synthetic construct
  misc_feature 1..69: note = mRNA 3'-end A64-N5
  source 1..69: mol_type = other RNA
aaaaaaaaaaaaaaaaaaaaaaaaaaaaaaaaaaaaaaaaaaaaaaaaaaaaaaaaaaaaaaaagaatt

SEQ ID NO: 144 - RNA, 124 nt, synthetic construct
  misc_feature 1..124: note = mRNA 3'-end histoneSL-A100
  source 1..124: mol_type = other RNA
caaaggctcttttcagagccaccaaaaaaaaaaaaaaaaaaaaaaaaaaaaaaaaaaaaaaaaaaaaaaaaaaaaaaaaaaaaaaaaaaaaaaaaaaaaaaaaaaaaaaaaaaaaaaaaaaaaa

SEQ ID NO: 145 - RNA, 88 nt, synthetic construct
  misc_feature 1..88: note = mRNA 3'-end histoneSL-A64
  source 1..88: mol_type = other RNA
caaaggctcttttcagagccaccaaaaaaaaaaaaaaaaaaaaaaaaaaaaaaaaaaaaaaaaaaaaaaaaaaaaaaaaaaaaaaaaa

SEQ ID NO: 146 - RNA, 100 nt, synthetic construct
  misc_feature 1..100: note = mRNA 3'-end A100
  source 1..100: mol_type = other RNA
aaaaaaaaaaaaaaaaaaaaaaaaaaaaaaaaaaaaaaaaaaaaaaaaaaaaaaaaaaaaaaaaaaaaaaaaaaaaaaaaaaaaaaaaaaaaaaaaaaaa

SEQ ID NO: 147 - RNA, 64 nt, synthetic construct
  misc_feature 1..64: note = mRNA 3'-end A64
  source 1..64: mol_type = other RNA
aaaaaaaaaaaaaaaaaaaaaaaaaaaaaaaaaaaaaaaaaaaaaaaaaaaaaaaaaaaaaaaa

SEQ ID NO: 148 - RNA, 93 nt, synthetic construct
  misc_feature 1..93: note = mRNA 3'-end A64-histoneSL-N5
  source 1..93: mol_type = other RNA
aaaaaaaaaaaaaaaaaaaaaaaaaaaaaaaaaaaaaaaaaaaaaaaaaaaaaaaaaaaaaaaacaaaggctcttttcagagccaccagaatt

SEQ ID NO: 149 - RNA, 134 nt, synthetic construct
  misc_feature 1..134: note = mRNA 3'-end N6-A64-N5-C30-histoneSL-N5
  source 1..134: mol_type = other RNA
attaataaaaaaaaaaaaaaaaaaaaaaaaaaaaaaaaaaaaaaaaaaaaaaaaaaaaaaaaaaaaaaaatgcatcccccccccccccccccccccccccccccccaaaggctcttttcagagccaccagaatt

SEQ ID NO: 150 - RNA, 134 nt, synthetic construct
  misc_feature 1..134: note = mRNA 3'-end N6-A64-N5-C30-histoneSL-N5
  source 1..134: mol_type = other RNA
agatctaaaaaaaaaaaaaaaaaaaaaaaaaaaaaaaaaaaaaaaaaaaaaaaaaaaaaaaaaaaaaaaatgcatcccccccccccccccccccccccccccccccaaaggctcttttcagagccaccagaatt

SEQ ID NO: 151 - RNA, 104 nt, synthetic construct
  misc_feature 1..104: note = mRNA 3'-end A64-N5-histoneSL-N5
  source 1..104: mol_type = other RNA
attaataaaaaaaaaaaaaaaaaaaaaaaaaaaaaaaaaaaaaaaaaaaaaaaaaaaaaaaaaaaaaaaatgcatcaaaggctcttttcagagccaccagaatt

SEQ ID NO: 152 - RNA, 104 nt, synthetic construct
  misc_feature 1..104: note = mRNA 3'-end A64-N5-histoneSL-N5
  source 1..104: mol_type = other RNA
agatctaaaaaaaaaaaaaaaaaaaaaaaaaaaaaaaaaaaaaaaaaaaaaaaaaaaaaaaaaaaaaaaatgcatcaaaggctcttttcagagccaccagaatt

SEQ ID NO: 153 - RNA, 135 nt, synthetic construct
  misc_feature 1..135: note = mRNA 3'-end N6-histoneSL-A100-N5
  source 1..135: mol_type = other RNA
attaatcaaaggctcttttcagagccaccaaaaaaaaaaaaaaaaaaaaaaaaaaaaaaaaaaaaaaaaaaaaaaaaaaaaaaaaaaaaaaaaaaaaaaaaaaaaaaaaaaaaaaaaaaaaaaaaaaaaagaatt

SEQ ID NO: 154 - RNA, 135 nt, synthetic construct
  misc_feature 1..135: note = mRNA 3'-end N6-histoneSL-A100-N5
  source 1..135: mol_type = other RNA
agatctcaaaggctcttttcagagccaccaaaaaaaaaaaaaaaaaaaaaaaaaaaaaaaaaaaaaaaaaaaaaaaaaaaaaaaaaaaaaaaaaaaaaaaaaaaaaaaaaaaaaaaaaaaaaaaaaaaaagaatt

SEQ ID NO: 155 - RNA, 99 nt, synthetic construct
  misc_feature 1..99: note = mRNA 3'-end N6-histoneSL-A64-N5
  source 1..99: mol_type = other RNA
attaatcaaaggctcttttcagagccaccaaaaaaaaaaaaaaaaaaaaaaaaaaaaaaaaaaaaaaaaaaaaaaaaaaaaaaaaaaaaaaaaagaatt

SEQ ID NO: 156 - RNA, 99 nt, synthetic construct
  misc_feature 1..99: note = mRNA 3'-end N6-histoneSL-A64-N5
  source 1..99: mol_type = other RNA
agatctcaaaggctcttttcagagccaccaaaaaaaaaaaaaaaaaaaaaaaaaaaaaaaaaaaaaaaaaaaaaaaaaaaaaaaaaaaaaaaaagaatt

SEQ ID NO: 157 - RNA, 111 nt, synthetic construct
  misc_feature 1..111: note = mRNA 3'-end N6-A100-N5
  source 1..111: mol_type = other RNA
attaataaaaaaaaaaaaaaaaaaaaaaaaaaaaaaaaaaaaaaaaaaaaaaaaaaaaaaaaaaaaaaaaaaaaaaaaaaaaaaaaaaaaaaaaaaaaaaaaaaaagaatt

SEQ ID NO: 158 - RNA, 111 nt, synthetic construct
  misc_feature 1..111: note = mRNA 3'-end N6-A100-N5
  source 1..111: mol_type = other RNA
agatctaaaaaaaaaaaaaaaaaaaaaaaaaaaaaaaaaaaaaaaaaaaaaaaaaaaaaaaaaaaaaaaaaaaaaaaaaaaaaaaaaaaaaaaaaaaaaaaaaaaagaatt

SEQ ID NO: 159 - RNA, 75 nt, synthetic construct
  misc_feature 1..75: note = mRNA 3'-end N6-A64-N5
  source 1..75: mol_type = other RNA
attaataaaaaaaaaaaaaaaaaaaaaaaaaaaaaaaaaaaaaaaaaaaaaaaaaaaaaaaaaaaaaaaagaatt

SEQ ID NO: 160 - RNA, 75 nt, synthetic construct
  misc_feature 1..75: note = mRNA 3'-end N6-A64-N5
  source 1..75: mol_type = other RNA
agatctaaaaaaaaaaaaaaaaaaaaaaaaaaaaaaaaaaaaaaaaaaaaaaaaaaaaaaaaaaaaaaaagaatt

SEQ ID NO: 161 - RNA, 130 nt, synthetic construct
  misc_feature 1..130: note = mRNA 3'-end N6-histoneSL-A100
  source 1..130: mol_type = other RNA
attaatcaaaggctcttttcagagccaccaaaaaaaaaaaaaaaaaaaaaaaaaaaaaaaaaaaaaaaaaaaaaaaaaaaaaaaaaaaaaaaaaaaaaaaaaaaaaaaaaaaaaaaaaaaaaaaaaaaaa

SEQ ID NO: 162 - RNA, 130 nt, synthetic construct
  misc_feature 1..130: note = mRNA 3'-end N6-histoneSL-A100
  source 1..130: mol_type = other RNA
agatctcaaaggctcttttcagagccaccaaaaaaaaaaaaaaaaaaaaaaaaaaaaaaaaaaaaaaaaaaaaaaaaaaaaaaaaaaaaaaaaaaaaaaaaaaaaaaaaaaaaaaaaaaaaaaaaaaaaa

SEQ ID NO: 163 - RNA, 94 nt, synthetic construct
  misc_feature 1..94: note = mRNA 3'-end N6-histoneSL-A64
  source 1..94: mol_type = other RNA
attaatcaaaggctcttttcagagccaccaaaaaaaaaaaaaaaaaaaaaaaaaaaaaaaaaaaaaaaaaaaaaaaaaaaaaaaaaaaaaaaaa

SEQ ID NO: 164 - RNA, 94 nt, synthetic construct
  misc_feature 1..94: note = mRNA 3'-end N6-histoneSL-A64
  source 1..94: mol_type = other RNA
agatctcaaaggctcttttcagagccaccaaaaaaaaaaaaaaaaaaaaaaaaaaaaaaaaaaaaaaaaaaaaaaaaaaaaaaaaaaaaaaaaa

SEQ ID NO: 165 - RNA, 106 nt, synthetic construct
  misc_feature 1..106: note = mRNA 3'-end N6-A100
  source 1..106: mol_type = other RNA
attaataaaaaaaaaaaaaaaaaaaaaaaaaaaaaaaaaaaaaaaaaaaaaaaaaaaaaaaaaaaaaaaaaaaaaaaaaaaaaaaaaaaaaaaaaaaaaaaaaaaa

SEQ ID NO: 166 - RNA, 106 nt, synthetic construct
  misc_feature 1..106: note = mRNA 3'-end N6-A100
  source 1..106: mol_type = other RNA
agatctaaaaaaaaaaaaaaaaaaaaaaaaaaaaaaaaaaaaaaaaaaaaaaaaaaaaaaaaaaaaaaaaaaaaaaaaaaaaaaaaaaaaaaaaaaaaaaaaaaaa

SEQ ID NO: 167 - RNA, 70 nt, synthetic construct
  misc_feature 1..70: note = mRNA 3'-end N6-A64
  source 1..70: mol_type = other RNA
attaataaaaaaaaaaaaaaaaaaaaaaaaaaaaaaaaaaaaaaaaaaaaaaaaaaaaaaaaaaaaaaaa

SEQ ID NO: 168 - RNA, 70 nt, synthetic construct
  misc_feature 1..70: note = mRNA 3'-end N6-A64
  source 1..70: mol_type = other RNA
agatctaaaaaaaaaaaaaaaaaaaaaaaaaaaaaaaaaaaaaaaaaaaaaaaaaaaaaaaaaaaaaaaa

SEQ ID NO: 169 - RNA, 99 nt, synthetic construct
  misc_feature 1..99: note = mRNA 3'-end N6-A64-histoneSL-N5
  source 1..99: mol_type = other RNA
attaataaaaaaaaaaaaaaaaaaaaaaaaaaaaaaaaaaaaaaaaaaaaaaaaaaaaaaaaaaaaaaaacaaaggctcttttcagagccaccagaatt

SEQ ID NO: 170 - RNA, 99 nt, synthetic construct
  misc_feature 1..99: note = mRNA 3'-end N6-A64-histoneSL-N5
  source 1..99: mol_type = other RNA
agatctaaaaaaaaaaaaaaaaaaaaaaaaaaaaaaaaaaaaaaaaaaaaaaaaaaaaaaaaaaaaaaaacaaaggctcttttcagagccaccagaatt

SEQ ID NO: 171 - RNA, 105 nt, synthetic construct
  misc_feature 1..105: note = mRNA 3'-end A100-N5
  source 1..105: mol_type = other RNA
aaaaaaaaaaaaaaaaaaaaaaaaaaaaaaaaaaaaaaaaaaaaaaaaaaaaaaaaaaaaaaaaaaaaaaaaaaaaaaaaaaaaaaaaaaaaaaaaaaaatctag

SEQ ID NO: 172 - RNA, 110 nt, synthetic construct
  misc_feature 1..110: note = mRNA 3'-end A30-N10-A70
  source 1..110: mol_type = other RNA
aaaaaaaaaaaaaaaaaaaaaaaaaaaaaagcatatgactaaaaaaaaaaaaaaaaaaaaaaaaaaaaaaaaaaaaaaaaaaaaaaaaaaaaaaaaaaaaaaaaaaaaaa

SEQ ID NO: 173 - protein, 14 aa, synthetic construct
  REGION 1..14: note = CR12C carrier peptide
CRRRRRRRRRRRRC

SEQ ID NO: 174 - protein, 13 aa, synthetic construct
  REGION 1..13: note = CR12 carrier peptide
CRRRRRRRRRRRR

SEQ ID NO: 175 - protein, 14 aa, synthetic construct
  REGION 1..14: note = WR12C carrier peptide
WRRRRRRRRRRRRC

SEQ ID NO: 176 - protein, 18 aa, synthetic construct
  REGION 1..18: note = CH6R4H6C carrier peptide
CHHHHHHRRRRHHHHHHC

SEQ ID NO: 177 - protein, 18 aa, synthetic construct
  REGION 1..18: note = CGH5R4H5GC carrier peptide
CGHHHHHRRRRHHHHHGC

SEQ ID NO: 178 - protein, 182 aa, Homo sapiens
  REGION 1..182: note = Homo sapiens__Q13951-1__CBFbeta protein
MPRVVPDQRSKFENEEFFRKLSRECEIKYTGFRDRPHEERQARFQNACRDGRSEIAFVATGTNLSLQFFPASWQGEQRQTPSREYVDLEREAGKVYLKAPMILNGVCVIWKGWIDLQRLDGMGCLEFDEERAQQEDALAQQAFEEARRRTREFEDRDRSHREEMEVRVSQLLAVTGKKTTRP

SEQ ID NO: 179 - protein, 223 aa, Homo sapiens
  REGION 1..223: note = Homo sapiens__A0A494C0A9__CBFbeta protein
MPRVVPDQRSKFENEEFFRKLSRECEIKYTGFRDRPHEERQARFQNACRDGRSEIAFVATGTNLSLQFFPASWQGEQRQTPSREYVDLEREAGKVYLKAPMILNGVCVIWKGWIDLQRLDGMGCLEFDEERAQQEDALAQQAFEEARRRTREFEDRDRSHREEMEVRVSQLLAVTEWRSTRKFSSFWIPPPRGCFCIALTSRENSSCWCVFFRLIWSHLMTAS

SEQ ID NO: 180 - protein, 202 aa, Homo sapiens
  REGION 1..202: note = Homo sapiens__J3KRT0__CBFbeta protein
MPRVVPDQRSKFENEEFFRKLSRECEIKYTGFRDRPHEERQARFQNACRDGRSEIVSRLARGARGSLVARGRGGPGRFRTAARLLRLPELSGRRLTSYSGFKMRNQMPRAGTRGETLFLGLAAVARVGQRSTASGARTRARLNKRRALFRRRHRRRVQGICSKQTPIRKKKWSFIQGFCGHRNQSVSPVFSGQLAGRTATNT

SEQ ID NO: 181 - protein, 187 aa, Homo sapiens
  REGION 1..187: note = Homo sapiens__Q13951-2__CBFbeta protein
MPRVVPDQRSKFENEEFFRKLSRECEIKYTGFRDRPHEERQARFQNACRDGRSEIAFVATGTNLSLQFFPASWQGEQRQTPSREYVDLEREAGKVYLKAPMILNGVCVIWKGWIDLQRLDGMGCLEFDEERAQQEDALAQQAFEEARRRTREFEDRDRSHREEMEARRQQDPSPGSNLGGGDDLKLR

SEQ ID NO: 182 - protein, 141 aa, Homo sapiens
  REGION 1..141: note = Homo sapiens__Q13951-1__CBFbeta(1-141) protein
MPRVVPDQRSKFENEEFFRKLSRECEIKYTGFRDRPHEERQARFQNACRDGRSEIAFVATGTNLSLQFFPASWQGEQRQTPSREYVDLEREAGKVYLKAPMILNGVCVIWKGWIDLQRLDGMGCLEFDEERAQQEDALAQQ

SEQ ID NO: 183 - protein, 165 aa, Homo sapiens
  REGION 1..165: note = Homo sapiens__Q13951-1__CBFbeta(1-165) protein
MPRVVPDQRSKFENEEFFRKLSRECEIKYTGFRDRPHEERQARFQNACRDGRSEIAFVATGTNLSLQFFPASWQGEQRQTPSREYVDLEREAGKVYLKAPMILNGVCVIWKGWIDLQRLDGMGCLEFDEERAQQEDALAQQAFEEARRRTREFEDRDRSHREEME

SEQ ID NO: 184 - protein, 1972 aa, Homo sapiens
  REGION 1..1972: note = Homo sapiens__P35749-1__SMMHC protein
MAQKGQLSDDEKFLFVDKNFINSPVAQADWAAKRLVWVPSEKQGFEAASIKEEKGDEVVVELVENGKKVTVGKDDIQKMNPPKFSKVEDMAELTCLNEASVLHNLRERYFSGLIYTYSGLFCVVVNPYKHLPIYSEKIVDMYKGKKRHEMPPHIYAIADTAYRSMLQDREDQSILCTGESGAGKTENTKKVIQYLAVVASSHKGKKDTSITGELEKQLLQANPILEAFGNAKTVKNDNSSRFGKFIRINFDVTGYIVGANIETYLLEKSRAIRQARDERTFHIFYYMIAGAKEKMRSDLLLEGFNNYTFLSNGFVPIPAAQDDEMFQETVEAMAIMGFSEEEQLSILKVVSSVLQLGNIVFKKERNTDQASMPDNTAAQKVCHLMGINVTDFTRSILTPRIKVGRDVVQKAQTKEQADFAVEALAKATYERLFRWILTRVNKALDKTHRQGASFLGILDIAGFEIFEVNSFEQLCINYTNEKLQQLFNHTMFILEQEEYQREGIEWNFIDFGLDLQPCIELIERPNNPPGVLALLDEECWFPKATDKSFVEKLCTEQGSHPKFQKPKQLKDKTEFSIIHYAGKVDYNASAWLTKNMDPLNDNVTSLLNASSDKFVADLWKDVDRIVGLDQMAKMTESSLPSASKTKKGMFRTVGQLYKEQLGKLMTTLRNTTPNFVRCIIPNHEKRSGKLDAFLVLEQLRCNGVLEGIRICRQGFPNRIVFQEFRQRYEILAANAIPKGFMDGKQACILMIKALELDPNLYRIGQSKIFFRTGVLAHLEEERDLKITDVIMAFQAMCRGYLARKAFAKRQQQLTAMKVIQRNCAAYLKLRNWQWWRLFTKVKPLLQVTRQEEEMQAKEDELQKTKERQQKAENELKELEQKHSQLTEEKNLLQEQLQAETELYAEAEEMRVRLAAKKQELEEILHEMEARLEEEEDRGQQLQAERKKMAQQMLDLEEQLEEEEAARQKLQLEKVTAEAKIKKLEDEILVMDDQNNKLSKERKLLEERISDLTTNLAEEEEKAKNLTKLKNKHESMISELEVRLKKEEKSRQELEKLKRKLEGDASDFHEQIADLQAQIAELKMQLAKKEEELQAALARLDDEIAQKNNALKKIRELEGHISDLQEDLDSERAARNKAEKQKRDLGEELEALKTELEDTLDSTATQQELRAKREQEVTVLKKALDEETRSHEAQVQEMRQKHAQAVEELTEQLEQFKRAKANLDKNKQTLEKENADLAGELRVLGQAKQEVEHKKKKLEAQVQELQSKCSDGERARAELNDKVHKLQNEVESVTGMLNEAEGKAIKLAKDVASLSSQLQDTQELLQEETRQKLNVSTKLRQLEEERNSLQDQLDEEMEAKQNLERHISTLNIQLSDSKKKLQDFASTVEALEEGKKRFQKEIENLTQQYEEKAAAYDKLEKTKNRLQQELDDLVVDLDNQRQLVSNLEKKQRKFDQLLAEEKNISSKYADERDRAEAEAREKETKALSLARALEEALEAKEELERTNKMLKAEMEDLVSSKDDVGKNVHELEKSKRALETQMEEMKTQLEELEDELQATEDAKLRLEVNMQALKGQFERDLQARDEQNEEKRRQLQRQLHEYETELEDERKQRALAAAAKKKLEGDLKDLELQADSAIKGREEAIKQLRKLQAQMKDFQRELEDARASRDEIFATAKENEKKAKSLEADLMQLQEDLAAAERARKQADLEKEELAEELASSLSGRNALQDEKRRLEARIAQLEEELEEEQGNMEAMSDRVRKATQQAEQLSNELATERSTAQKNESARQQLERQNKELRSKLHEMEGAVKSKFKSTIAALEAKIAQLEEQVEQEAREKQAATKSLKQKDKKLKEILLQVEDERKMAEQYKEQAEKGNARVKQLKRQLEEAEEESQRINANRRKLQRELDEATESNEAMGREVNALKSKLRRGNETSFVPSRRSGGRRVIENADGSEEETDTRDADFNGTKASE

SEQ ID NO: 185 - protein, 1979 aa, Homo sapiens
  REGION 1..1979: note = Homo sapiens__P35749-2__SMMHC protein
MAQKGQLSDDEKFLFVDKNFINSPVAQADWAAKRLVWVPSEKQGFEAASIKEEKGDEVVVELVENGKKVTVGKDDIQKMNPPKFSKVEDMAELTCLNEASVLHNLRERYFSGLIYTYSGLFCVVVNPYKHLPIYSEKIVDMYKGKKRHEMPPHIYAIADTAYRSMLQDREDQSILCTGESGAGKTENTKKVIQYLAVVASSHKGKKDTSITQGPSFAYGELEKQLLQANPILEAFGNAKTVKNDNSSRFGKFIRINFDVTGYIVGANIETYLLEKSRAIRQARDERTFHIFYYMIAGAKEKMRSDLLLEGFNNYTFLSNGFVPIPAAQDDEMFQETVEAMAIMGFSEEEQLSILKVVSSVLQLGNIVFKKERNTDQASMPDNTAAQKVCHLMGINVTDFTRSILTPRIKVGRDVVQKAQTKEQADFAVEALAKATYERLFRWILTRVNKALDKTHRQGASFLGILDIAGFEIFEVNSFEQLCINYTNEKLQQLFNHTMFILEQEEYQREGIEWNFIDFGLDLQPCIELIERPNNPPGVLALLDEECWFPKATDKSFVEKLCTEQGSHPKFQKPKQLKDKTEFSIIHYAGKVDYNASAWLTKNMDPLNDNVTSLLNASSDKFVADLWKDVDRIVGLDQMAKMTESSLPSASKTKKGMFRTVGQLYKEQLGKLMTTLRNTTPNFVRCIIPNHEKRSGKLDAFLVLEQLRCNGVLEGIRICRQGFPNRIVFQEFRQRYEILAANAIPKGFMDGKQACILMIKALELDPNLYRIGQSKIFFRTGVLAHLEEERDLKITDVIMAFQAMCRGYLARKAFAKRQQQLTAMKVIQRNCAAYLKLRNWQWWRLFTKVKPLLQVTRQEEEMQAKEDELQKTKERQQKAENELKELEQKHSQLTEEKNLLQEQLQAETELYAEAEEMRVRLAAKKQELEEILHEMEARLEEEEDRGQQLQAERKKMAQQMLDLEEQLEEEEAARQKLQLEKVTAEAKIKKLEDEILVMDDQNNKLSKERKLLEERISDLTTNLAEEEEKAKNLTKLKNKHESMISELEVRLKKEEKSRQELEKLKRKLEGDASDFHEQIADLQAQIAELKMQLAKKEEELQAALARLDDEIAQKNNALKKIRELEGHISDLQEDLDSERAARNKAEKQKRDLGEELEALKTELEDTLDSTATQQELRAKREQEVTVLKKALDEETRSHEAQVQEMRQKHAQAVEELTEQLEQFKRAKANLDKNKQTLEKENADLAGELRVLGQAKQEVEHKKKKLEAQVQELQSKCSDGERARAELNDKVHKLQNEVESVTGMLNEAEGKAIKLAKDVASLSSQLQDTQELLQEETRQKLNVSTKLRQLEEERNSLQDQLDEEMEAKQNLERHISTLNIQLSDSKKKLQDFASTVEALEEGKKRFQKEIENLTQQYEEKAAAYDKLEKTKNRLQQELDDLVVDLDNQRQLVSNLEKKQRKFDQLLAEEKNISSKYADERDRAEAEAREKETKALSLARALEEALEAKEELERTNKMLKAEMEDLVSSKDDVGKNVHELEKSKRALETQMEEMKTQLEELEDELQATEDAKLRLEVNMQALKGQFERDLQARDEQNEEKRRQLQRQLHEYETELEDERKQRALAAAAKKKLEGDLKDLELQADSAIKGREEAIKQLRKLQAQMKDFQRELEDARASRDEIFATAKENEKKAKSLEADLMQLQEDLAAAERARKQADLEKEELAEELASSLSGRNALQDEKRRLEARIAQLEEELEEEQGNMEAMSDRVRKATQQAEQLSNELATERSTAQKNESARQQLERQNKELRSKLHEMEGAVKSKFKSTIAALEAKIAQLEEQVEQEAREKQAATKSLKQKDKKLKEILLQVEDERKMAEQYKEQAEKGNARVKQLKRQLEEAEEESQRINANRRKLQRELDEATESNEAMGREVNALKSKLRRGNETSFVPSRRSGGRRVIENADGSEEETDTRDADFNGTKASE

SEQ ID NO: 186 - protein, 1945 aa, Homo sapiens
  REGION 1..1945: note = Homo sapiens__P35749-3__SMMHC protein
MAQKGQLSDDEKFLFVDKNFINSPVAQADWAAKRLVWVPSEKQGFEAASIKEEKGDEVVVELVENGKKVTVGKDDIQKMNPPKFSKVEDMAELTCLNEASVLHNLRERYFSGLIYTYSGLFCVVVNPYKHLPIYSEKIVDMYKGKKRHEMPPHIYAIADTAYRSMLQDREDQSILCTGESGAGKTENTKKVIQYLAVVASSHKGKKDTSITQGPSFAYGELEKQLLQANPILEAFGNAKTVKNDNSSRFGKFIRINFDVTGYIVGANIETYLLEKSRAIRQARDERTFHIFYYMIAGAKEKMRSDLLLEGFNNYTFLSNGFVPIPAAQDDEMFQETVEAMAIMGFSEEEQLSILKVVSSVLQLGNIVFKKERNTDQASMPDNTAAQKVCHLMGINVTDFTRSILTPRIKVGRDVVQKAQTKEQADFAVEALAKATYERLFRWILTRVNKALDKTHRQGASFLGILDIAGFEIFEVNSFEQLCINYTNEKLQQLFNHTMFILEQEEYQREGIEWNFIDFGLDLQPCIELIERPNNPPGVLALLDEECWFPKATDKSFVEKLCTEQGSHPKFQKPKQLKDKTEFSIIHYAGKVDYNASAWLTKNMDPLNDNVTSLLNASSDKFVADLWKDVDRIVGLDQMAKMTESSLPSASKTKKGMFRTVGQLYKEQLGKLMTTLRNTTPNFVRCIIPNHEKRSGKLDAFLVLEQLRCNGVLEGIRICRQGFPNRIVFQEFRQRYEILAANAIPKGFMDGKQACILMIKALELDPNLYRIGQSKIFFRTGVLAHLEEERDLKITDVIMAFQAMCRGYLARKAFAKRQQQLTAMKVIQRNCAAYLKLRNWQWWRLFTKVKPLLQVTRQEEEMQAKEDELQKTKERQQKAENELKELEQKHSQLTEEKNLLQEQLQAETELYAEAEEMRVRLAAKKQELEEILHEMEARLEEEEDRGQQLQAERKKMAQQMLDLEEQLEEEEAARQKLQLEKVTAEAKIKKLEDEILVMDDQNNKLSKERKLLEERISDLTTNLAEEEEKAKNLTKLKNKHESMISELEVRLKKEEKSRQELEKLKRKLEGDASDFHEQIADLQAQIAELKMQLAKKEEELQAALARLDDEIAQKNNALKKIRELEGHISDLQEDLDSERAARNKAEKQKRDLGEELEALKTELEDTLDSTATQQELRAKREQEVTVLKKALDEETRSHEAQVQEMRQKHAQAVEELTEQLEQFKRAKANLDKNKQTLEKENADLAGELRVLGQAKQEVEHKKKKLEAQVQELQSKCSDGERARAELNDKVHKLQNEVESVTGMLNEAEGKAIKLAKDVASLSSQLQDTQELLQEETRQKLNVSTKLRQLEEERNSLQDQLDEEMEAKQNLERHISTLNIQLSDSKKKLQDFASTVEALEEGKKRFQKEIENLTQQYEEKAAAYDKLEKTKNRLQQELDDLVVDLDNQRQLVSNLEKKQRKFDQLLAEEKNISSKYADERDRAEAEAREKETKALSLARALEEALEAKEELERTNKMLKAEMEDLVSSKDDVGKNVHELEKSKRALETQMEEMKTQLEELEDELQATEDAKLRLEVNMQALKGQFERDLQARDEQNEEKRRQLQRQLHEYETELEDERKQRALAAAAKKKLEGDLKDLELQADSAIKGREEAIKQLRKLQAQMKDFQRELEDARASRDEIFATAKENEKKAKSLEADLMQLQEDLAAAERARKQADLEKEELAEELASSLSGRNALQDEKRRLEARIAQLEEELEEEQGNMEAMSDRVRKATQQAEQLSNELATERSTAQKNESARQQLERQNKELRSKLHEMEGAVKSKFKSTIAALEAKIAQLEEQVEQEAREKQAATKSLKQKDKKLKEILLQVEDERKMAEQYKEQAEKGNARVKQLKRQLEEAEEESQRINANRRKLQRELDEATESNEAMGREVNALKSKLRGPPPQETSQ

SEQ ID NO: 187 - protein, 1938 aa, Homo sapiens
  REGION 1..1938: note = Homo sapiens__P35749-4__SMMHC protein
MAQKGQLSDDEKFLFVDKNFINSPVAQADWAAKRLVWVPSEKQGFEAASIKEEKGDEVVVELVENGKKVTVGKDDIQKMNPPKFSKVEDMAELTCLNEASVLHNLRERYFSGLIYTYSGLFCVVVNPYKHLPIYSEKIVDMYKGKKRHEMPPHIYAIADTAYRSMLQDREDQSILCTGESGAGKTENTKKVIQYLAVVASSHKGKKDTSITGELEKQLLQANPILEAFGNAKTVKNDNSSRFGKFIRINFDVTGYIVGANIETYLLEKSRAIRQARDERTFHIFYYMIAGAKEKMRSDLLLEGFNNYTFLSNGFVPIPAAQDDEMFQETVEAMAIMGFSEEEQLSILKVVSSVLQLGNIVFKKERNTDQASMPDNTAAQKVCHLMGINVTDFTRSILTPRIKVGRDVVQKAQTKEQADFAVEALAKATYERLFRWILTRVNKALDKTHRQGASFLGILDIAGFEIFEVNSFEQLCINYTNEKLQQLFNHTMFILEQEEYQREGIEWNFIDFGLDLQPCIELIERPNNPPGVLALLDEECWFPKATDKSFVEKLCTEQGSHPKFQKPKQLKDKTEFSIIHYAGKVDYNASAWLTKNMDPLNDNVTSLLNASSDKFVADLWKDVDRIVGLDQMAKMTESSLPSASKTKKGMFRTVGQLYKEQLGKLMTTLRNTTPNFVRCIIPNHEKRSGKLDAFLVLEQLRCNGVLEGIRICRQGFPNRIVFQEFRQRYEILAANAIPKGFMDGKQACILMIKALELDPNLYRIGQSKIFFRTGVLAHLEEERDLKITDVIMAFQAMCRGYLARKAFAKRQQQLTAMKVIQRNCAAYLKLRNWQWWRLFTKVKPLLQVTRQEEEMQAKEDELQKTKERQQKAENELKELEQKHSQLTEEKNLLQEQLQAETELYAEAEEMRVRLAAKKQELEEILHEMEARLEEEEDRGQQLQAERKKMAQQMLDLEEQLEEEEAARQKLQLEKVTAEAKIKKLEDEILVMDDQNNKLSKERKLLEERISDLTTNLAEEEEKAKNLTKLKNKHESMISELEVRLKKEEKSRQELEKLKRKLEGDASDFHEQIADLQAQIAELKMQLAKKEEELQAALARLDDEIAQKNNALKKIRELEGHISDLQEDLDSERAARNKAEKQKRDLGEELEALKTELEDTLDSTATQQELRAKREQEVTVLKKALDEETRSHEAQVQEMRQKHAQAVEELTEQLEQFKRAKANLDKNKQTLEKENADLAGELRVLGQAKQEVEHKKKKLEAQVQELQSKCSDGERARAELNDKVHKLQNEVESVTGMLNEAEGKAIKLAKDVASLSSQLQDTQELLQEETRQKLNVSTKLRQLEEERNSLQDQLDEEMEAKQNLERHISTLNIQLSDSKKKLQDFASTVEALEEGKKRFQKEIENLTQQYEEKAAAYDKLEKTKNRLQQELDDLVVDLDNQRQLVSNLEKKQRKFDQLLAEEKNISSKYADERDRAEAEAREKETKALSLARALEEALEAKEELERTNKMLKAEMEDLVSSKDDVGKNVHELEKSKRALETQMEEMKTQLEELEDELQATEDAKLRLEVNMQALKGQFERDLQARDEQNEEKRRQLQRQLHEYETELEDERKQRALAAAAKKKLEGDLKDLELQADSAIKGREEAIKQLRKLQAQMKDFQRELEDARASRDEIFATAKENEKKAKSLEADLMQLQEDLAAAERARKQADLEKEELAEELASSLSGRNALQDEKRRLEARIAQLEEELEEEQGNMEAMSDRVRKATQQAEQLSNELATERSTAQKNESARQQLERQNKELRSKLHEMEGAVKSKFKSTIAALEAKIAQLEEQVEQEAREKQAATKSLKQKDKKLKEILLQVEDERKMAEQYKEQAEKGNARVKQLKRQLEEAEEESQRINANRRKLQRELDEATESNEAMGREVNALKSKLRGPPPQETSQ

SEQ ID NO: 188 - protein, 446 aa, Homo sapiens
  REGION 1..446: note = Homo sapiens__P35749-1__SMMHC(1527-1972) protein
VHELEKSKRALETQMEEMKTQLEELEDELQATEDAKLRLEVNMQALKGQFERDLQARDEQNEEKRRQLQRQLHEYETELEDERKQRALAAAAKKKLEGDLKDLELQADSAIKGREEAIKQLRKLQAQMKDFQRELEDARASRDEIFATAKENEKKAKSLEADLMQLQEDLAAAERARKQADLEKEELAEELASSLSGRNALQDEKRRLEARIAQLEEELEEEQGNMEAMSDRVRKATQQAEQLSNELATERSTAQKNESARQQLERQNKELRSKLHEMEGAVKSKFKSTIAALEAKIAQLEEQVEQEAREKQAATKSLKQKDKKLKEILLQVEDERKMAEQYKEQAEKGNARVKQLKRQLEEAEEESQRINANRRKLQRELDEATESNEAMGREVNALKSKLRRGNETSFVPSRRSGGRRVIENADGSEEETDTRDADFNGTKASE

SEQ ID NO: 189 - protein, 351 aa, Homo sapiens
  REGION 1..351: note = Homo sapiens__P35749-1__SMMHC(1527-1877) protein
VHELEKSKRALETQMEEMKTQLEELEDELQATEDAKLRLEVNMQALKGQFERDLQARDEQNEEKRRQLQRQLHEYETELEDERKQRALAAAAKKKLEGDLKDLELQADSAIKGREEAIKQLRKLQAQMKDFQRELEDARASRDEIFATAKENEKKAKSLEADLMQLQEDLAAAERARKQADLEKEELAEELASSLSGRNALQDEKRRLEARIAQLEEELEEEQGNMEAMSDRVRKATQQAEQLSNELATERSTAQKNESARQQLERQNKELRSKLHEMEGAVKSKFKSTIAALEAKIAQLEEQVEQEAREKQAATKSLKQKDKKLKEILLQVEDERKMAEQYKEQAEKGNA

SEQ ID NO: 190 - protein, 164 aa, Homo sapiens
  REGION 1..164: note = Homo sapiens__P35749-1__SMMHC(1809-1972) protein
KSKFKSTIAALEAKIAQLEEQVEQEAREKQAATKSLKQKDKKLKEILLQVEDERKMAEQYKEQAEKGNARVKQLKRQLEEAEEESQRINANRRKLQRELDEATESNEAMGREVNALKSKLRRGNETSFVPSRRSGGRRVIENADGSEEETDTRDADFNGTKASE

SEQ ID NO: 191 - protein, 69 aa, Homo sapiens
  REGION 1..69: note = Homo sapiens__P35749-1__SMMHC(1809-1877) protein
KSKFKSTIAALEAKIAQLEEQVEQEAREKQAATKSLKQKDKKLKEILLQVEDERKMAEQYKEQAEKGNA

SEQ ID NO: 192 - protein, 23 aa, synthetic construct
  REGION 1..23: note = Artificial____Lifeact protein
GVADLIKKFESISKEEGDPPVAT

SEQ ID NO: 193 - protein, 17 aa, Saccharomyces cerevisiae
  REGION 1..17: note = Saccharomyces cerevisiae S288C__NP_014882.4__Lifeact(1-17) protein
MGVADLIKKFESISKEE

SEQ ID NO: 194 - protein, 826 aa, Homo sapiens
  REGION 1..826: note = Homo sapiens__Q16665-1__HIF1alpha protein
MEGAGGANDKKKISSERRKEKSRDAARSRRSKESEVFYELAHQLPLPHNVSSHLDKASVMRLTISYLRVRKLLDAGDLDIEDDMKAQMNCFYLKALDGFVMVLTDDGDMIYISDNVNKYMGLTQFELTGHSVFDFTHPCDHEEMREMLTHRNGLVKKGKEQNTQRSFFLRMKCTLTSRGRTMNIKSATWKVLHCTGHIHVYDTNSNQPQCGYKKPPMTCLVLICEPIPHPSNIEIPLDSKTFLSRHSLDMKFSYCDERITELMGYEPEELLGRSIYEYYHALDSDHLTKTHHDMFTKGQVTTGQYRMLAKRGGYVWVETQATVIYNTKNSQPQCIVCVNYVVSGIIQHDLIFSLQQTECVLKPVESSDMKMTQLFTKVESEDTSSLFDKLKKEPDALTLLAPAAGDTIISLDFGSNDTETDDQQLEEVPLYNDVMLPSPNEKLQNINLAMSPLPTAETPKPLRSSADPALNQEVALKLEPNPESLELSFTMPQIQDQTPSPSDGSTRQSSPEPNSPSEYCFYVDSDMVNEFKLELVEKLFAEDTEAKNPFSTQDTDLDLEMLAPYIPMDDDFQLRSFDQLSPLESSSASPESASPQSTVTVFQQTQIQEPTANATTTTATTDELKTVTKDRMEDIKILIASPSPTHIHKETTSATSSPYRDTQSRTASPNRAGKGVIEQTEKSHPRSPNVLSVALSQRTTVPEEELNPKILALQNAQRKRKMEHDGSLFQAVGIGTLLQQPDDHAATTSLSWKRVKGCKSSEQNGMEQKTIILIPSDLACRLLGQSMDESGLPQLTSYDCEVNAPIQGSRNLLQGEELLRALDQVN

SEQ ID NO: 195 - protein, 27 aa, Homo sapiens
  REGION 1..27: note = Homo sapiens__Q16665-1__HIF1alpha(549-575) protein
PFSTQDTDLDLEMLAPYIPMDDDFQLR

SEQ ID NO: 196 - protein, 15 aa, synthetic construct
  REGION 1..15: note = Artificial____Linker protein
GGSGGSGGSGGSGGG

SEQ ID NO: 197 - protein, 453 aa, synthetic construct
  REGION 1..453: note = Homo sapiens__Q01196-1__RUNX1(K83E_R174Q) protein
MRIPVDASTSRRFTPPSTALSPGKMSEALPLGAPDAGAALAGKLRSGDRSMVEVLADHPGELVRTDSPNFLCSVLPTHWRCNETLPIAFKVVALGDVPDGTLVTVMAGNDENYSAELRNATAAMKNQVARFNDLRFVGRSGRGKSFTLTITVFTNPPQVATYHRAIKITVDGPQEPRRHRQKLDDQTKPGSLSFSERLSELEQLRRTAMRVSPHHPAPTPNPRASLNHSTAFNPQPQSQMQDTRQIQPSPPWSYDQSYQYLGSIASPSVHPATPISPGRASGMTTLSAELSSRLSTAPDLTAFSDPRQFPALPSISDPRMHYPGAFTYSPTPVTSGIGIGMSAMGSATRYHTYLPPPYPGSSQAQGGPFQASSPSYHLYYGASAGSYQFSMVGGERSPPRILPPCTNASTGSALLNPSLPNQSDVVEAEGSHSNSPTNMAPSARLEEAVWRPY

SEQ ID NO: 198 - protein, 453 aa, Homo sapiens
  REGION 1..453: note = Homo sapiens__Q01196-1__RUNX1 protein
MRIPVDASTSRRFTPPSTALSPGKMSEALPLGAPDAGAALAGKLRSGDRSMVEVLADHPGELVRTDSPNFLCSVLPTHWRCNKTLPIAFKVVALGDVPDGTLVTVMAGNDENYSAELRNATAAMKNQVARFNDLRFVGRSGRGKSFTLTITVFTNPPQVATYHRAIKITVDGPREPRRHRQKLDDQTKPGSLSFSERLSELEQLRRTAMRVSPHHPAPTPNPRASLNHSTAFNPQPQSQMQDTRQIQPSPPWSYDQSYQYLGSIASPSVHPATPISPGRASGMTTLSAELSSRLSTAPDLTAFSDPRQFPALPSISDPRMHYPGAFTYSPTPVTSGIGIGMSAMGSATRYHTYLPPPYPGSSQAQGGPFQASSPSYHLYYGASAGSYQFSMVGGERSPPRILPPCTNASTGSALLNPSLPNQSDVVEAEGSHSNSPTNMAPSARLEEAVWRPY

SEQ ID NO: 199 - protein, 480 aa, Homo sapiens
  REGION 1..480: note = Homo sapiens__Q01196-8__RUNX1 protein
MASDSIFESFPSYPQCFMRECILGMNPSRDVHDASTSRRFTPPSTALSPGKMSEALPLGAPDAGAALAGKLRSGDRSMVEVLADHPGELVRTDSPNFLCSVLPTHWRCNKTLPIAFKVVALGDVPDGTLVTVMAGNDENYSAELRNATAAMKNQVARFNDLRFVGRSGRGKSFTLTITVFTNPPQVATYHRAIKITVDGPREPRRHRQKLDDQTKPGSLSFSERLSELEQLRRTAMRVSPHHPAPTPNPRASLNHSTAFNPQPQSQMQDTRQIQPSPPWSYDQSYQYLGSIASPSVHPATPISPGRASGMTTLSAELSSRLSTAPDLTAFSDPRQFPALPSISDPRMHYPGAFTYSPTPVTSGIGIGMSAMGSATRYHTYLPPPYPGSSQAQGGPFQASSPSYHLYYGASAGSYQFSMVGGERSPPRILPPCTNASTGSALLNPSLPNQSDVVEAEGSHSNSPTNMAPSARLEEAVWRPY

SEQ ID NO: 200 - protein, 472 aa, Homo sapiens
  REGION 1..472: note = Homo sapiens__Q01196-2__RUNX1 protein
MRIPVDASTSRRFTPPSTALSPGKMSEALPLGAPDAGAALAGKLRSGDRSMVEVLADHPGELVRTDSPNFLCSVLPTHWRCNKTLPIAFKVVALGDVPDGTLVTVMAGNDENYSAELRNATAAMKNQVARFNDLRFVGRSGRGKSFTLTITVFTNPPQVATYHRAIKITVDGPREPRRHRQKLDDQTKPGSLSFSERLSELEQLRRTAMRVSPHHPAPTPNPRASLNHSTAFNPQPQSQMQDTRQIQPSPPWSYDQSYQYLGSIASPSVHPATPISPGRASGMTTLSAELSSRLSTAPDLTAFSDPRQFPALPSISDPRMHYPGAFTYSPTPVTSGIGIGMSAMGSATRYHTYLPPPYPGSSQAQGGPFQASSPSYHLYYGASAGSYQFSMVGGERSPPRILPPCTNASTGSALLNPSLPNQSDVVEAEGSHSNSPTNMGGASCSRQARRDPGPWARTPSWGRGRPTDRISL

SEQ ID NO: 201 - protein, 472 aa, Homo sapiens
  REGION 1..472: note = Homo sapiens__CAA56092.1__RUNX1 protein
MRIPVDASTSRRFTPPSTALSPGKMSEALPLGAPDAGAALAGKLRSGDRSMVEVLADHPGELVRTDSPNFLCSVLPTHWRCNKTLPIAFKVVALGDVPDGTLVTVMAGNDENYSAELRNATAAMKNQVARFNDLRFVGRSGRGKSFTLTITVFTNPPQVATYHRAIKITVDGPREPRRHRQKLDDQTKPGSLSFSERLSELEQLRRTAMRVSPHHPAPTPNPRASLNHSTAFNPQPQSQMQDTRQIQPSPPWSYDQSYQYLGSIASPSVHPATPISPGRASGMTTLSAELSSRLSTAPDLTAFSDPRQFPALPSISDPRMHYPGAFTYSPTPVTSGIGIGMSAMGSATRYHTYLPPPYPGSSQAQGGPFQASSPSYHLYYGASAGSYQFSMVGGERSPPRILPPCTNASTGSALLNPSLPNQSDVVEAEGRHRNSPTNMGGASCSRQARRDPGPWARTPSWGRGRPTDRISL

SEQ ID NO: 202 - protein, 468 aa, Homo sapiens
  REGION 1..468: note = Homo sapiens__Q01196-10__RUNX1 protein
MPAAPRGPAQGEAAARTRSRDASTSRRFTPPSTALSPGKMSEALPLGAPDAGAALAGKLRSGDRSMVEVLADHPGELVRTDSPNFLCSVLPTHWRCNKTLPIAFKVVALGDVPDGTLVTVMAGNDENYSAELRNATAAMKNQVARFNDLRFVGRSGRGKSFTLTITVFTNPPQVATYHRAIKITVDGPREPRRHRQKLDDQTKPGSLSFSERLSELEQLRRTAMRVSPHHPAPTPNPRASLNHSTAFNPQPQSQMQDTRQIQPSPPWSYDQSYQYLGSIASPSVHPATPISPGRASGMTTLSAELSSRLSTAPDLTAFSDPRQFPALPSISDPRMHYPGAFTYSPTPVTSGIGIGMSAMGSATRYHTYLPPPYPGSSQAQGGPFQASSPSYHLYYGASAGSYQFSMVGGERSPPRILPPCTNASTGSALLNPSLPNQSDVVEAEGSHSNSPTNMAPSARLEEAVWRPY

SEQ ID NO: 203 - protein, 456 aa, Homo sapiens
  REGION 1..456: note = Homo sapiens__Q01196-9__RUNX1 protein
MNPSRDVHDASTSRRFTPPSTALSPGKMSEALPLGAPDAGAALAGKLRSGDRSMVEVLADHPGELVRTDSPNFLCSVLPTHWRCNKTLPIAFKVVALGDVPDGTLVTVMAGNDENYSAELRNATAAMKNQVARFNDLRFVGRSGRGKSFTLTITVFTNPPQVATYHRAIKITVDGPREPRRHRQKLDDQTKPGSLSFSERLSELEQLRRTAMRVSPHHPAPTPNPRASLNHSTAFNPQPQSQMQDTRQIQPSPPWSYDQSYQYLGSIASPSVHPATPISPGRASGMTTLSAELSSRLSTAPDLTAFSDPRQFPALPSISDPRMHYPGAFTYSPTPVTSGIGIGMSAMGSATRYHTYLPPPYPGSSQAQGGPFQASSPSYHLYYGASAGSYQFSMVGGERSPPRILPPCTNASTGSALLNPSLPNQSDVVEAEGSHSNSPTNMAPSARLEEAVWRPY

SEQ ID NO: 204 - protein, 453 aa, Homo sapiens [sequence omitted]

SEQ ID NO: 205 - protein, 389 aa, Homo sapiens
  REGION 1..389: note = Homo sapiens__H9KVB1__RUNX1 protein
MRIPVDASTSRRFTPPSTALSPGKMSEALPLGAPDAGAALAGKLRSGDRSMVEVLADHPGELVRTDSPNFLCSVLPTHWRCNKTLPIAFKVVALGDVPDGTLVTVMAGNDENYSAELRNATAAMKNQVARFNDLRFVGRSGRGKSFTLTITVFTNPPQVATYHRAIKITVDGPREPRNTRQIQPSPPWSYDQSYQYLGSIASPSVHPATPISPGRASGMTTLSAELSSRLSTAPDLTAFSDPRQFPALPSISDPRMHYPGAFTYSPTPVTSGIGIGMSAMGSATRYHTYLPPPYPGSSQAQGGPFQASSPSYHLYYGASAGSYQFSMVGGERSPPRILPPCTNASTGSALLNPSLPNQSDVVEAEGSHSNSPTNMAPSARLEEAVWRPY

SEQ ID NO: 206 - protein, 348 aa, Homo sapiens
  REGION 1..348: note = Homo sapiens__Q01196-11__RUNX1 protein
MAGNDENYSAELRNATAAMKNQVARFNDLRFVGRSGRGKSFTLTITVFTNPPQVATYHRAIKITVDGPREPRRHRQKLDDQTKPGSLSFSERLSELEQLRRTAMRVSPHHPAPTPNPRASLNHSTAFNPQPQSQMQDTRQIQPSPPWSYDQSYQYLGSIASPSVHPATPISPGRASGMTTLSAELSSRLSTAPDLTAFSDPRQFPALPSISDPRMHYPGAFTYSPTPVTSGIGIGMSAMGSATRYHTYLPPPYPGSSQAQGGPFQASSPSYHLYYGASAGSYQFSMVGGERSPPRILPPCTNASTGSALLNPSLPNQSDVVEAEGSHSNSPTNMAPSARLEEAVWRPY

SEQ ID NO: 207 - protein, 257 aa, Homo sapiens
  REGION 1..257: note = Homo sapiens__Q01196-4__RUNX1 protein
MRIPVDASTSRRFTPPSTALSPGKMSEALPLGAPDAGAALAGKLRSGDRSMVEVLADHPGELVRTDSPNFLCSVLPTHWRCNKTLPIAFKVVALGDVPDGTLVTVMAGNDENYSAELRNATAAMKNQVARFNDLRFVGRSGRGKSFTLTITVFTNPPQVATYHRAIKITVDGPREPRRHRQKLDDQTKPGSLSFSERLSELEQLRRTAMRVSPHHPAPTPNPRASLNHSTAFNPQPQSQMQDTRQIQPSPPWSYDQS

SEQ ID NO: 208 - protein, 256 aa, Homo sapiens
  REGION 1..256: note = Homo sapiens__A8MZI9__RUNX1 protein
MPAAPRGPAQGEAAARTRSRDASTSRRFTPPSTALSPGKMSEALPLGAPDAGAALAGKLRSGDRSMVEVLADHPGELVRTDSPNFLCSVLPTHWRCNKTLPIAFKVVALGDVPDGTLVTVMAGNDENYSAELRNATAAMKNQVARFNDLRFVGRSGRGKSFTLTITVFTNPPQVATYHRAIKITVDGPREPRRHRQKLDDQTKPGSLSFSERLSELEQLRRTAMRVSPHHPAPTPNPRASLNHSTAFNPQPQSQMQ

SEQ ID NO: 209 - protein, 250 aa, Homo sapiens
  REGION 1..250: note = Homo sapiens__Q01196-3__RUNX1 protein
MRIPVDASTSRRFTPPSTALSPGKMSEALPLGAPDAGAALAGKLRSGDRSMVEVLADHPGELVRTDSPNFLCSVLPTHWRCNKTLPIAFKVVALGDVPDGTLVTVMAGNDENYSAELRNATAAMKNQVARFNDLRFVGRSGRGKSFTLTITVFTNPPQVATYHRAIKITVDGPREPRRHRQKLDDQTKPGSLSFSERLSELEQLRRTAMRVSPHHPAPTPNPRASLNHSTAFNPQPQSQMQEEDTAPWRC

SEQ ID NO: 210 - protein, 242 aa, Homo sapiens
  REGION 1..242: note = Homo sapiens__Q01196-7__RUNX1 protein
MRIPVDASTSRRFTPPSTALSPGKMSEALPLGAPDAGAALAGKLRSGDRSMVEVLADHPGELVRTDSPNFLCSVLPTHWRCNKTLPIAFKVVALGDVPDGTLVTVMAGNDENYSAELRNATAAMKNQVARFNDLRFVDGPREPRRHRQKLDDQTKPGSLSFSERLSELEQLRRTAMRVSPHHPAPTPNPRASLNHSTAFNPQPQSQMQDTRQIQPSPPWSYDQSYQYLGSIASPSVHPATPI

SEQ ID NO: 211 - protein, 224 aa, Homo sapiens
  REGION 1..224: note = Homo sapiens__Q01196-5__RUNX1 protein
MRIPVDASTSRRFTPPSTALSPGKMSEALPLGAPDAGAALAGKLRSGDRSMVEVLADHPGELVRTDSPNFLCSVLPTHWRCNKTLPIAFKVVALGDVPDGTLVTVMAGNDENYSAELRNATAAMKNQVARFNDLRFVGRSGRGKSFTLTITVFTNPPQVATYHRAIKITVDGPREPRSKCIHLGLVHPPGWYTLQAGILRDHVSDSLGSTFPPGGWQAPVKPKS

SEQ ID NO: 212 - protein, 188 aa, Homo sapiens
  REGION 1..188: note = Homo sapiens__Q01196-6__RUNX1 protein
MRIPVDASTSRRFTPPSTALSPGKMSEALPLGAPDAGAALAGKLRSGDRSMVEVLADHPGELVRTDSPNFLCSVLPTHWRCNKTLPIAFKVVALGDVPDGTLVTVMAGNDENYSAELRNATAAMKNQVARFNDLRFVGRSGRGKSFTLTITVFTNPPQVATYHRAIKITVDGPREPRNSLTWPRYPHI

SEQ ID NO: 213 - protein, 128 aa, Homo sapiens
  REGION 1..128: note = Homo sapiens__Q01196-1__RUNX1(1-128) protein
MRIPVDASTSRRFTPPSTALSPGKMSEALPLGAPDAGAALAGKLRSGDRSMVEVLADHPGELVRTDSPNFLCSVLPTHWRCNKTLPIAFKVVALGDVPDGTLVTVMAGNDENYSAELRNATAAMKNQV

SEQ ID NO: 214 - protein, 177 aa, Homo sapiens
  REGION 1..177: note = Homo sapiens__Q01196-1__RUNX1(1-177) protein
MRIPVDASTSRRFTPPSTALSPGKMSEALPLGAPDAGAALAGKLRSGDRSMVEVLADHPGELVRTDSPNFLCSVLPTHWRCNKTLPIAFKVVALGDVPDGTLVTVMAGNDENYSAELRNATAAMKNQVARFNDLRFVGRSGRGKSFTLTITVFTNPPQVATYHRAIKITVDGPREPR

SEQ ID NO: 215 - protein, 241 aa, Homo sapiens
  REGION 1..241: note = Homo sapiens__Q01196-1__RUNX1(1-241) protein
MRIPVDASTSRRFTPPSTALSPGKMSEALPLGAPDAGAALAGKLRSGDRSMVEVLADHPGELVRTDSPNFLCSVLPTHWRCNKTLPIAFKVVALGDVPDGTLVTVMAGNDENYSAELRNATAAMKNQVARFNDLRFVGRSGRGKSFTLTITVFTNPPQVATYHRAIKITVDGPREPRRHRQKLDDQTKPGSLSFSERLSELEQLRRTAMRVSPHHPAPTPNPRASLNHSTAFNPQPQSQMQ

SEQ ID NO: 216 - protein, 604 aa, Homo sapiens
  REGION 1..604: note = Homo sapiens__Q06455-1__RUNX1T1a protein
MISVKRNTWRALSLVIGDCRKKGNFEYCQDRTEKHSTMPDSPVDVKTQSRLTPPTMPPPPTTQGAPRTSSFTPTTLTNGTSHSPTALNGAPSPPNGFSNGPSSSSSSSLANQQLPPACGARQLSKLKRFLTTLQQFGNDISPEIGERVRTLVLGLVNSTLTIEEFHSKLQEATNFPLRPFVIPFLKANLPLLQRELLHCARLAKQNPAQYLAQHEQLLLDASTTSPVDSSELLLDVNENGKRRTPDRTKENGFDREPLHSEHPSKRPCTISPGQRYSPNNGLSYQPNGLPHPTPPPPQHYRLDDMAIAHHYRDSYRHPSHRDLRDRNRPMGLHGTRQEEMIDHRLTDREWAEEWKHLDHLLNCIMDMVEKTRRSLTVLRRCQEADREELNYWIRRYSDAEDLKKGGGSSSSHSRQQSPVNPDPVALDAHREFLHRPASGYVPEEIWKKAEEAVNEVKRQAMTELQKAVSEAERKAHDMITTERAKMERTVAEAKRQAAEDALAVINQQEDSSESCWNCGRKASETCSGCNTARYCGSFCQHKDWEKHHHICGQTLQAQQQGDTPAVSSSVTPNSGAGSPMDTPPAATPRSTTPGTPSTIETTPR

SEQ ID NO: 217 - protein, 663 aa, Homo sapiens
  REGION 1..663: note = Homo sapiens__A0A0A0MSU1__RUNX1T1a protein
MCHPDKAFTSDKLQCVFNEYKAAVWVPPRPRPLSRAPLPEAGGENLHLKISRVRKRNLPFVVWGEEEASTPGLDAISHHLCYPDRTHRDRTEKHSTMPDSPVDVKTQSRLTPPTMPPPPTTQGAPRTSSFTPTTLTNGTSHSPTALNGAPSPPNGFSNGPSSSSSSSLANQQLPPACGARQLSKLKRFLTTLQQFGNDISPEIGERVRTLVLGLVNSTLTIEEFHSKLQEATNFPLRPFVIPFLKANLPLLQRELLHCARLAKQNPAQYLAQHEQLLLDASTTSPVDSSELLLDVNENGKRRTPDRTKENGFDREPLHSEHPSKRPCTISPGQRYSPNNGLSYQPNGLPHPTPPPPQHYRLDDMAIAHHYRDSYRHPSHRDLRDRNRPMGLHGTRQEEMIDHRLTDREWAEEWKHLDHLLNCIMDMVEKTRRSLTVLRRCQEADREELNYWIRRYSDAEDLKKGGGSSSSHSRQQSPVNPDPVALDAHREFLHRPASGYVPEEIWKKAEEAVNEVKRQAMTELQKAVSEAERKAHDMITTERAKMERTVAEAKRQAAEDALAVINQQEDSSESCWNCGRKASETCSGCNTARYCGSFCQHKDWEKHHHICGQTLQAQQQGDTPAVSSSVTPNSGAGSPMDTPPAATPRSTTPGTPSTIETTPR

SEQ ID NO: 218 - protein, 615 aa, Homo sapiens
  REGION 1..615: note = Homo sapiens__Q06455-3__RUNX1T1a protein
MCHPDKAFTSDKLQCVFNEYKAAVWVPPRPRPLSRAPLPEDRTEKHSTMPDSPVDVKTQSRLTPPTMPPPPTTQGAPRTSSFTPTTLTNGTSHSPTALNGAPSPPNGFSNGPSSSSSSSLANQQLPPACGARQLSKLKRFLTTLQQFGNDISPEIGERVRTLVLGLVNSTLTIEEFHSKLQEATNFPLRPFVIPFLKANLPLLQRELLHCARLAKQNPAQYLAQHEQLLLDASTTSPVDSSELLLDVNENGKRRTPDRTKENGFDREPLHSEHPSKRPCTISPGQRYSPNNGLSYQPNGLPHPTPPPPQHYRLDDMAIAHHYRDSYRHPSHRDLRDRNRPMGLHGTRQEEMIDHRLTDREWAEEWKHLDHLLNCIMDMVEKTRRSLTVLRRCQEADREELNYWIRRYSDAEDLKKGGGSSSSHSRQQSPVNPDPVALDAHREFLHRPASGYVPEEIWKKAEEAVNEVKRQAMTELQKAVSEAERKAHDMITTERAKMERTVAEAKRQAAEDALAVINQQEDSSESCWNCGRKASETCSGCNTARYCGSFCQHKDWEKHHHICGQTLQAQQQGDTPAVSSSVTPNSGAGSPMDTPPAATPRSTTPGTPSTIETTPR

SEQ ID NO: 219 - protein, 584 aa, Homo sapiens
  REGION 1..584: note = Homo sapiens__A0A087WWT6__RUNX1T1a protein
MVGLSGPVQYRTEKHSTMPDSPVDVKTQSRLTPPTMPPPPTTQGAPRTSSFTPTTLTNGTSHSPTALNGAPSPPNGFSNGPSSSSSSSLANQQLPPACGARQLSKLKRFLTTLQQFGNDISPEIGERVRTLVLGLVNSTLTIEEFHSKLQEATNFPLRPFVIPFLKANLPLLQRELLHCARLAKQNPAQYLAQHEQLLLDASTTSPVDSSELLLDVNENGKRRTPDRTKENGFDREPLHSEHPSKRPCTISPGQRYSPNNGLSYQPNGLPHPTPPPPQHYRLDDMAIAHHYRDSYRHPSHRDLRDRNRPMGLHGTRQEEMIDHRLTDREWAEEWKHLDHLLNCIMDMVEKTRRSLTVLRRCQEADREELNYWIRRYSDAEDLKKGGGSSSSHSRQQSPVNPDPVALDAHREFLHRPASGYVPEEIWKKAEEAVNEVKRQAMTELQKAVSEAERKAHDMITTERAKMERTVAEAKRQAAEDALAVINQQEDSSESCWNCGRKASETCSGCNTARYCGSFCQHKDWEKHHHICGQTLQAQQQGDTPAVSSSVTPNSGAGSPMDTPPAATPRSTTPGTPSTIETTPR

SEQ ID NO: 220 - protein, 577 aa, Homo sapiens
  REGION 1..577: note = Homo sapiens__Q06455-2__RUNX1T1a protein
MPDRTEKHSTMPDSPVDVKTQSRLTPPTMPPPPTTQGAPRTSSFTPTTLTNGTSHSPTALNGAPSPPNGFSNGPSSSSSSSLANQQLPPACGARQLSKLKRFLTTLQQFGNDISPEIGERVRTLVLGLVNSTLTIEEFHSKLQEATNFPLRPFVIPFLKANLPLLQRELLHCARLAKQNPAQYLAQHEQLLLDASTTSPVDSSELLLDVNENGKRRTPDRTKENGFDREPLHSEHPSKRPCTISPGQRYSPNNGLSYQPNGLPHPTPPPPQHYRLDDMAIAHHYRDSYRHPSHRDLRDRNRPMGLHGTRQEEMIDHRLTDREWAEEWKHLDHLLNCIMDMVEKTRRSLTVLRRCQEADREELNYWIRRYSDAEDLKKGGGSSSSHSRQQSPVNPDPVALDAHREFLHRPASGYVPEEIWKKAEEAVNEVKRQAMTELQKAVSEAERKAHDMITTERAKMERTVAEAKRQAAEDALAVINQQEDSSESCWNCGRKASETCSGCNTARYCGSFCQHKDWEKHHHICGQTLQAQQQGDTPAVSSSVTPNSGAGSPMDTPPAATPRSTTPGTPSTIETTPR

SEQ ID NO: 221 - protein, 567 aa, Homo sapiens
  REGION 1..567: note = Homo sapiens__Q06455-4__RUNX1T1a protein
MPDSPVDVKTQSRLTPPTMPPPPTTQGAPRTSSFTPTTLTNGTSHSPTALNGAPSPPNGFSNGPSSSSSSSLANQQLPPACGARQLSKLKRFLTTLQQFGNDISPEIGERVRTLVLGLVNSTLTIEEFHSKLQEATNFPLRPFVIPFLKANLPLLQRELLHCARLAKQNPAQYLAQHEQLLLDASTTSPVDSSELLLDVNENGKRRTPDRTKENGFDREPLHSEHPSKRPCTISPGQRYSPNNGLSYQPNGLPHPTPPPPQHYRLDDMAIAHHYRDSYRHPSHRDLRDRNRPMGLHGTRQEEMIDHRLTDREWAEEWKHLDHLLNCIMDMVEKTRRSLTVLRRCQEADREELNYWIRRYSDAEDLKKGGGSSSSHSRQQSPVNPDPVALDAHREFLHRPASGYVPEEIWKKAEEAVNEVKRQAMTELQKAVSEAERKAHDMITTERAKMERTVAEAKRQAAEDALAVINQQEDSSESCWNCGRKASETCSGCNTARYCGSFCQHKDWEKHHHICGQTLQAQQQGDTPAVSSSVTPNSGAGSPMDTPPAATPRSTTPGTPSTIETTPR

SEQ ID NO: 222 - protein, 427 aa, Homo sapiens
  REGION 1..427: note = Homo sapiens__Q06455-5__RUNX1T1a protein
MISVKRNTWRALSLVIGDCRKKGNFEYCQDRTEKHSTMPDSPVDVKTQSRLTPPTMPPPPTTQGAPRTSSFTPTTLTNGTSHSPTALNGAPSPPNGFSNGPSSSSSSSLANQQLPPACGARQLSKLKRFLTTLQQFGNDISPEIGERVRTLVLGLVNSTLTIEEFHSKLQEATNFPLRPFVIPFLKANLPLLQRELLHCARLAKQNPAQYLAQHEQLLLDASTTSPVDSSELLLDVNENGKRRTPDRTKENGFDREPLHSEHPSKRPCTISPGQRYSPNNGLSYQPNGLPHPTPPPPQHYRLDDMAIAHHYRDSYRHPSHRDLRDRNRPMGLHGTRQEEMIDHRLTDREWAEEWKHLDHLLNCIMDMVEKTRRSLTVLRRCQEADREELNYWIRRYSDAEDLKKGGGSSSSHSRQQSPVNPDPVALG

SEQ ID NO: 223 - protein, 400 aa, Homo sapiens
  REGION 1..400: note = Homo sapiens__Q06455-6__RUNX1T1a protein
MPDRTEKHSTMPDSPVDVKTQSRLTPPTMPPPPTTQGAPRTSSFTPTTLTNGTSHSPTALNGAPSPPNGFSNGPSSSSSSSLANQQLPPACGARQLSKLKRFLTTLQQFGNDISPEIGERVRTLVLGLVNSTLTIEEFHSKLQEATNFPLRPFVIPFLKANLPLLQRELLHCARLAKQNPAQYLAQHEQLLLDASTTSPVDSSELLLDVNENGKRRTPDRTKENGFDREPLHSEHPSKRPCTISPGQRYSPNNGLSYQPNGLPHPTPPPPQHYRLDDMAIAHHYRDSYRHPSHRDLRDRNRPMGLHGTRQEEMIDHRLTDREWAEEWKHLDHLLNCIMDMVEKTRRSLTVLRRCQEADREELNYWIRRYSDAEDLKKGGGSSSSHSRQQSPVNPDPVALG

SEQ ID NO: 224 - protein, 574 aa, Homo sapiens
  REGION 1..574: note = Homo sapiens__Q06455-1__RUNX1T1a(31-604) protein
RTEKHSTMPDSPVDVKTQSRLTPPTMPPPPTTQGAPRTSSFTPTTLTNGTSHSPTALNGAPSPPNGFSNGPSSSSSSSLANQQLPPACGARQLSKLKRFLTTLQQFGNDISPEIGERVRTLVLGLVNSTLTIEEFHSKLQEATNFPLRPFVIPFLKANLPLLQRELLHCARLAKQNPAQYLAQHEQLLLDASTTSPVDSSELLLDVNENGKRRTPDRTKENGFDREPLHSEHPSKRPCTISPGQRYSPNNGLSYQPNGLPHPTPPPPQHYRLDDMAIAHHYRDSYRHPSHRDLRDRNRPMGLHGTRQEEMIDHRLTDREWAEEWKHLDHLLNCIMDMVEKTRRSLTVLRRCQEADREELNYWIRRYSDAEDLKKGGGSSSSHSRQQSPVNPDPVALDAHREFLHRPASGYVPEEIWKKAEEAVNEVKRQAMTELQKAVSEAERKAHDMITTERAKMERTVAEAKRQAAEDALAVINQQEDSSESCWNCGRKASETCSGCNTARYCGSFCQHKDWEKHHHICGQTLQAQQQGDTPAVSSSVTPNSGAGSPMDTPPAATPRSTTPGTPSTIETTPR

SEQ ID NO: 225 - protein, 604 aa, Homo sapiens
  REGION 1..604: note = Homo sapiens__O43439-1__RUNX1T1b protein
MAKESGISLKEIQVLARQWKVGPEKRVPAMPGSPVEVKIQSRSSPPTMPPLPPINPGGPRPVSFTPTALSNGINHSPPTLNGAPSPPQRFSNGPASSTSSALTNQQLPATCGARQLSKLKRFLTTLQQFGNDISPEIGEKVRTLVLALVNSTVTIEEFHCKLQEATNFPLRPFVIPFLKANLPLLQRELLHCARAAKQTPSQYLAQHEHLLLNTSIASPADSSELLMEVHGNGKRPSPERREENSFDRDTIAPEPPAKRVCTISPAPRHSPALTVPLMNPGGQFHPTPPPLQHYTLEDIATSHLYREPNKMLEHREVRDRHHSLGLNGGYQDELVDHRLTEREWADEWKHLDHALNCIMEMVEKTRRSMAVLRRCQESDREELNYWKRRYNENTELRKTGTELVSRQHSPGSADSLSNDSQREFNSRPGTGYVPVEFWKKTEEAVNKVKIQAMSEVQKAVAEAEQKAFEVIATERARMEQTIADVKRQAAEDAFLVINEQEESTENCWNCGRKASETCSGCNIARYCGSFCQHKDWERHHRLCGQNLHGQSPHGQGRPLLPVGRGSSARSADCSVPSPALDKTSATTSRSSTPASVTAIDTNGL

SEQ ID NO: 226 - protein, 614 aa, Homo sapiens
  REGION 1..614: note = Homo sapiens__O43439-4__RUNX1T1b protein
MGFHHVGQARLELLTSGDLPALASQRAGITVGPEKRVPAMPGSPVEVKIQSRSSPPTMPPLPPINPGGPRPVSFTPTALSNGINHSPPTLNGAPSPPQRFSNGPASSTSSALTNQQLPATCGARQLSKLKRFLTTLQQFGNDISPEIGEKVRTLVLALVNSTVTIEEFHCKLQEATNFPLRPFVIPFLKANLPLLQRELLHCARAAKQTPSQYLAQHEHLLLNTSIASPADSSELLMEVHGNGKRPSPERREENSFDRDTIAPEPPAKRVCTISPAPRHSPALTVPLMNPGGQFHPTPPPLQHYTLEDIATSHLYREPNKMLEHREVRDRHHSLGLNGGYQDELVDHRLTEREWADEWKHLDHALNCIMEMVEKTRRSMAVLRRCQESDREELNYWKRRYNENTELRKTGTELVSRQHSPGSADSLSNDSQREFNSRPGTGYVPVEFWKKTEEAVNKVKIQAMSEVQKAVAEAEQKAFEVIATERARMEQTIADVKRQAAEDAFLVINEQEESTENCWNCGRKASETCSGCNIARYCGSFCQHKDWERHHRLCGQNLHGQSPHGQGRPLLPVGRGSSARSADCSVPSPALDKTSATTSRSSTPASVTAIDTNGL

SEQ ID NO: 227 - protein, 595 aa, Homo sapiens
  REGION 1..595: note = Homo sapiens__O43439-5__RUNX1T1b protein
MVGVPGAAAFQLGPEKRVPAMPGSPVEVKIQSRSSPPTMPPLPPINPGGPRPVSFTPTALSNGINHSPPTLNGAPSPPQRFSNGPASSTSSALTNQQLPATCGARQLSKLKRFLTTLQQFGNDISPEIGEKVRTLVLALVNSTVTIEEFHCKLQEATNFPLRPFVIPFLKANLPLLQRELLHCARAAKQTPSQYLAQHEHLLLNTSIASPADSSELLMEVHGNGKRPSPERREENSFDRDTIAPEPPAKRVCTISPAPRHSPALTVPLMNPGGQFHPTPPPLQHYTLEDIATSHLYREPNKMLEHREVRDRHHSLGLNGGYQDELVDHRLTEREWADEWKHLDHALNCIMEMVEKTRRSMAVLRRCQESDREELNYWKRRYNENTELRKTGTELVSRQHSPGSADSLSNDSQREFNSRPGTGYVPVEFWKKTEEAVNKVKIQAMSEVQKAVAEAEQKAFEVIATERARMEQTIADVKRQAAEDAFLVINEQEESTENCWNCGRKASETCSGCNIARYCGSFCQHKDWERHHRLCGQNLHGQSPHGQGRPLLPVGRGSSARSADCSVPSPALDKTSATTSRSSTPASVTAIDTNGL

SEQ ID NO: 228 - protein, 575 aa, Homo sapiens
  REGION 1..575: note = Homo sapiens__O43439-2__RUNX1T1b protein
MPGSPVEVKIQSRSSPPTMPPLPPINPGGPRPVSFTPTALSNGINHSPPTLNGAPSPPQRFSNGPASSTSSALTNQQLPATCGARQLSKLKRFLTTLQQFGNDISPEIGEKVRTLVLALVNSTVTIEEFHCKLQEATNFPLRPFVIPFLKANLPLLQRELLHCARAAKQTPSQYLAQHEHLLLNTSIASPADSSELLMEVHGNGKRPSPERREENSFDRDTIAPEPPAKRVCTISPAPRHSPALTVPLMNPGGQFHPTPPPLQHYTLEDIATSHLYREPNKMLEHREVRDRHHSLGLNGGYQDELVDHRLTEREWADEWKHLDHALNCIMEMVEKTRRSMAVLRRCQESDREELNYWKRRYNENTELRKTGTELVSRQHSPGSADSLSNDSQREFNSRPGTGYVPVEFWKKTEEAVNKVKIQAMSEVQKAVAEAEQKAFEVIATERARMEQTIADVKRQAAEDAFLVINEQEESTENCWNCGRKASETCSGCNIARYCGSFCQHKDWERHHRLCGQNLHGQSPHGQGRPLLPVGRGSSARSADCSVPSPALDKTSATTSRSSTPASVTAIDTNGL

SEQ ID NO: 229 - protein, 16 aa, Homo sapiens
  REGION 1..16: note = Homo sapiens____RUNX1T1b(short) protein
EVGFCHVAQVGLKLLG

SEQ ID NO: 230 - protein, 583 aa, Homo sapiens
  REGION 1..583: note = Homo sapiens__O43439-1__RUNX1T1b(22-604) protein
GPEKRVPAMPGSPVEVKIQSRSSPPTMPPLPPINPGGPRPVSFTPTALSNGINHSPPTLNGAPSPPQRFSNGPASSTSSALTNQQLPATCGARQLSKLKRFLTTLQQFGNDISPEIGEKVRTLVLALVNSTVTIEEFHCKLQEATNFPLRPFVIPFLKANLPLLQRELLHCARAAKQTPSQYLAQHEHLLLNTSIASPADSSELLMEVHGNGKRPSPERREENSFDRDTIAPEPPAKRVCTISPAPRHSPALTVPLMNPGGQFHPTPPPLQHYTLEDIATSHLYREPNKMLEHREVRDRHHSLGLNGGYQDELVDHRLTEREWADEWKHLDHALNCIMEMVEKTRRSMAVLRRCQESDREELNYWKRRYNENTELRKTGTELVSRQHSPGSADSLSNDSQREFNSRPGTGYVPVEFWKKTEEAVNKVKIQAMSEVQKAVAEAEQKAFEVIATERARMEQTIADVKRQAAEDAFLVINEQEESTENCWNCGRKASETCSGCNIARYCGSFCQHKDWERHHRLCGQNLHGQSPHGQGRPLLPVGRGSSARSADCSVPSPALDKTSATTSRSSTPASVTAIDTNGL

SEQ ID NO: 231 - protein, 611 aa, Homo sapiens
  REGION 1..611: note = Homo sapiens____CBFbeta(1-165)_SMMHC(1527-1972) protein
MPRVVPDQRSKFENEEFFRKLSRECEIKYTGFRDRPHEERQARFQNACRDGRSEIAFVATGTNLSLQFFPASWQGEQRQTPSREYVDLEREAGKVYLKAPMILNGVCVIWKGWIDLQRLDGMGCLEFDEERAQQEDALAQQAFEEARRRTREFEDRDRSHREEMEVHELEKSKRALETQMEEMKTQLEELEDELQATEDAKLRLEVNMQALKGQFERDLQARDEQNEEKRRQLQRQLHEYETELEDERKQRALAAAAKKKLEGDLKDLELQADSAIKGREEAIKQLRKLQAQMKDFQRELEDARASRDEIFATAKENEKKAKSLEADLMQLQEDLAAAERARKQADLEKEELAEELASSLSGRNALQDEKRRLEARIAQLEEELEEEQGNMEAMSDRVRKATQQAEQLSNELATERSTAQKNESARQQLERQNKELRSKLHEMEGAVKSKFKSTIAALEAKIAQLEEQVEQEAREKQAATKSLKQKDKKLKEILLQVEDERKMAEQYKEQAEKGNARVKQLKRQLEEAEEESQRINANRRKLQRELDEATESNEAMGREVNALKSKLRRGNETSFVPSRRSGGRRVIENADGSEEETDTRDADFNGTKASE

SEQ ID NO: 232 - protein, 516 aa, synthetic construct
  REGION 1..516: note = Artificial____CBFbeta(1-165)_SMMHC(1527-1877) protein
MPRVVPDQRSKFENEEFFRKLSRECEIKYTGFRDRPHEERQARFQNACRDGRSEIAFVATGTNLSLQFFPASWQGEQRQTPSREYVDLEREAGKVYLKAPMILNGVCVIWKGWIDLQRLDGMGCLEFDEERAQQEDALAQQAFEEARRRTREFEDRDRSHREEMEVHELEKSKRALETQMEEMKTQLEELEDELQATEDAKLRLEVNMQALKGQFERDLQARDEQNEEKRRQLQRQLHEYETELEDERKQRALAAAAKKKLEGDLKDLELQADSAIKGREEAIKQLRKLQAQMKDFQRELEDARASRDEIFATAKENEKKAKSLEADLMQLQEDLAAAERARKQADLEKEELAEELASSLSGRNALQDEKRRLEARIAQLEEELEEEQGNMEAMSDRVRKATQQAEQLSNELATERSTAQKNESARQQLERQNKELRSKLHEMEGAVKSKFKSTIAALEAKIAQLEEQVEQEAREKQAATKSLKQKDKKLKEILLQVEDERKMAEQYKEQAEKGNA

SEQ ID NO: 233 - protein, 203 aa, synthetic construct
  REGION 1..203: note = Artificial____CBFbeta(1-165)_Linker_Lifeact protein
MPRVVPDQRSKFENEEFFRKLSRECEIKYTGFRDRPHEERQARFQNACRDGRSEIAFVATGTNLSLQFFPASWQGEQRQTPSREYVDLEREAGKVYLKAPMILNGVCVIWKGWIDLQRLDGMGCLEFDEERAQQEDALAQQAFEEARRRTREFEDRDRSHREEMEGGSGGSGGSGGSGGGGVADLIKKFESISKEEGDPPVAT

SEQ ID NO: 234 - protein, 192 aa, synthetic construct
  REGION 1..192: note = Artificial____CBFbeta(1-165)_HIF1alpha(549-575) protein
MPRVVPDQRSKFENEEFFRKLSRECEIKYTGFRDRPHEERQARFQNACRDGRSEIAFVATGTNLSLQFFPASWQGEQRQTPSREYVDLEREAGKVYLKAPMILNGVCVIWKGWIDLQRLDGMGCLEFDEERAQQEDALAQQAFEEARRRTREFEDRDRSHREEMEPFSTQDTDLDLEMLAPYIPMDDDFQLR

SEQ ID NO: 235 - protein, 207 aa, synthetic construct
  REGION 1..207: note Artificial____CBFbeta(1-165)_Linker_HIF1alpha(549-575) protein
MPRVVPDQRSKFENEEFFRKLSRECEIKYTGFRDRPHEERQARFQNACRDGRSEIAFVATGTNLSLQFFPASWQGEQRQTPSREYVDLEREAGKVYLKAPMILNGVCVIWKGWIDLQRLDGMGCLEFDEERAQQEDALAQQAFEEARRRTREFEDRDRSHREEMEGGSGGSGGSGGSGGGPFSTQDTDLDLEMLAPYIPMDDDFQLR

SEQ ID NO: 236 - protein, 752 aa, synthetic construct
  REGION 1..752: note = Artificial____RUNX1(1-177)_N_RUNX1T1a(31-604) protein
MRIPVDASTSRRFTPPSTALSPGKMSEALPLGAPDAGAALAGKLRSGDRSMVEVLADHPGELVRTDSPNFLCSVLPTHWRCNKTLPIAFKVVALGDVPDGTLVTVMAGNDENYSAELRNATAAMKNQVARFNDLRFVGRSGRGKSFTLTITVFTNPPQVATYHRAIKITVDGPREPRNRTEKHSTMPDSPVDVKTQSRLTPPTMPPPPTTQGAPRTSSFTPTTLTNGTSHSPTALNGAPSPPNGFSNGPSSSSSSSLANQQLPPACGARQLSKLKRFLTTLQQFGNDISPEIGERVRTLVLGLVNSTLTIEEFHSKLQEATNFPLRPFVIPFLKANLPLLQRELLHCARLAKQNPAQYLAQHEQLLLDASTTSPVDSSELLLDVNENGKRRTPDRTKENGFDREPLHSEHPSKRPCTISPGQRYSPNNGLSYQPNGLPHPTPPPPQHYRLDDMAIAHHYRDSYRHPSHRDLRDRNRPMGLHGTRQEEMIDHRLTDREWAEEWKHLDHLLNCIMDMVEKTRRSLTVLRRCQEADREELNYWIRRYSDAEDLKKGGGSSSSHSRQQSPVNPDPVALDAHREFLHRPASGYVPEEIWKKAEEAVNEVKRQAMTELQKAVSEAERKAHDMITTERAKMERTVAEAKRQAAEDALAVINQQEDSSESCWNCGRKASETCSGCNTARYCGSFCQHKDWEKHHHICGQTLQAQQQGDTPAVSSSVTPNSGAGSPMDTPPAATPRSTTPGTPSTIETTPR

SEQ ID NO: 237 - protein, 257 aa, synthetic construct
  REGION 1..257: note = Artificial____RUNX1(1-241)_RUNX1T1b(short) protein
MRIPVDASTSRRFTPPSTALSPGKMSEALPLGAPDAGAALAGKLRSGDRSMVEVLADHPGELVRTDSPNFLCSVLPTHWRCNKTLPIAFKVVALGDVPDGTLVTVMAGNDENYSAELRNATAAMKNQVARFNDLRFVGRSGRGKSFTLTITVFTNPPQVATYHRAIKITVDGPREPRRHRQKLDDQTKPGSLSFSERLSELEQLRRTAMRVSPHHPAPTPNPRASLNHSTAFNPQPQSQMQEVGFCHVAQVGLKLLG

SEQ ID NO: 238 - protein, 825 aa, synthetic construct
  REGION 1..825: note = Artificial____RUNX1(1-241)_V_RUNX1T1b(22-604) protein
MRIPVDASTSRRFTPPSTALSPGKMSEALPLGAPDAGAALAGKLRSGDRSMVEVLADHPGELVRTDSPNFLCSVLPTHWRCNKTLPIAFKVVALGDVPDGTLVTVMAGNDENYSAELRNATAAMKNQVARFNDLRFVGRSGRGKSFTLTITVFTNPPQVATYHRAIKITVDGPREPRRHRQKLDDQTKPGSLSFSERLSELEQLRRTAMRVSPHHPAPTPNPRASLNHSTAFNPQPQSQMQVGPEKRVPAMPGSPVEVKIQSRSSPPTMPPLPPINPGGPRPVSFTPTALSNGINHSPPTLNGAPSPPQRFSNGPASSTSSALTNQQLPATCGARQLSKLKRFLTTLQQFGNDISPEIGEKVRTLVLALVNSTVTIEEFHCKLQEATNFPLRPFVIPFLKANLPLLQRELLHCARAAKQTPSQYLAQHEHLLLNTSIASPADSSELLMEVHGNGKRPSPERREENSFDRDTIAPEPPAKRVCTISPAPRHSPALTVPLMNPGGQFHPTPPPLQHYTLEDIATSHLYREPNKMLEHREVRDRHHSLGLNGGYQDELVDHRLTEREWADEWKHLDHALNCIMEMVEKTRRSMAVLRRCQESDREELNYWKRRYNENTELRKTGTELVSRQHSPGSADSLSNDSQREFNSRPGTGYVPVEFWKKTEEAVNKVKIQAMSEVQKAVAEAEQKAFEVIATERARMEQTIADVKRQAAEDAFLVINEQEESTENCWNCGRKASETCSGCNIARYCGSFCQHKDWERHHRLCGQNLHGQSPHGQGRPLLPVGRGSSARSADCSVPSPALDKTSATTSRSSTPASVTAIDTNGL

SEQ ID NO: 239 - protein, 825 aa, synthetic construct
  REGION 1..825: note = Artificial____RUNX1(1-241)_I_RUNX1T1b(22-604) protein
MRIPVDASTSRRFTPPSTALSPGKMSEALPLGAPDAGAALAGKLRSGDRSMVEVLADHPGELVRTDSPNFLCSVLPTHWRCNKTLPIAFKVVALGDVPDGTLVTVMAGNDENYSAELRNATAAMKNQVARFNDLRFVGRSGRGKSFTLTITVFTNPPQVATYHRAIKITVDGPREPRRHRQKLDDQTKPGSLSFSERLSELEQLRRTAMRVSPHHPAPTPNPRASLNHSTAFNPQPQSQMQIGPEKRVPAMPGSPVEVKIQSRSSPPTMPPLPPINPGGPRPVSFTPTALSNGINHSPPTLNGAPSPPQRFSNGPASSTSSALTNQQLPATCGARQLSKLKRFLTTLQQFGNDISPEIGEKVRTLVLALVNSTVTIEEFHCKLQEATNFPLRPFVIPFLKANLPLLQRELLHCARAAKQTPSQYLAQHEHLLLNTSIASPADSSELLMEVHGNGKRPSPERREENSFDRDTIAPEPPAKRVCTISPAPRHSPALTVPLMNPGGQFHPTPPPLQHYTLEDIATSHLYREPNKMLEHREVRDRHHSLGLNGGYQDELVDHRLTEREWADEWKHLDHALNCIMEMVEKTRRSMAVLRRCQESDREELNYWKRRYNENTELRKTGTELVSRQHSPGSADSLSNDSQREFNSRPGTGYVPVEFWKKTEEAVNKVKIQAMSEVQKAVAEAEQKAFEVIATERARMEQTIADVKRQAAEDAFLVINEQEESTENCWNCGRKASETCSGCNIARYCGSFCQHKDWERHHRLCGQNLHGQSPHGQGRPLLPVGRGSSARSADCSVPSPALDKTSATTSRSSTPASVTAIDTNGL

SEQ ID NO: 240 - RNA, 549 nt, Homo sapiens
  misc_feature 1..549: note = Homo sapiens__Q13951-1__CBFbeta CDS wt
  source 1..549: mol_type = mRNA
atgccgcgcgtcgtgcccgaccagagaagcaagttcgagaacgaggagttttttaggaagctgagccgcgagtgtgagattaagtacacgggcttcagggaccggccccacgaggaacgccaggcacgcttccagaacgcctgccgcgacggccgctcggaaatcgcttttgtggccacaggaaccaatctgtctctccagttttttccggccagctggcagggagaacagcgacaaacacctagccgagagtatgtcgacttagaaagagaagcaggcaaggtatatttgaaggctcccatgattctgaatggagtctgtgttatctggaaaggctggattgatctccaaagactggatggtatgggctgtctggagtttgatgaggagcgagcccagcaggaggatgcattagcacaacaggcctttgaagaggctcggagaaggacacgcgaatttgaagatagagacaggtctcatcgggaggaaatggaggtgagagtttcacagctgctggcagtaactggcaagaagacaacaagaccctag

SEQ ID NO: 241 - RNA, 672 nt, Homo sapiens
  misc_feature 1..672: note = Homo sapiens__A0A494C0A9__CBFbeta CDS wt
  source 1..672: mol_type = mRNA
atgccgcgcgtcgtgcccgaccagagaagcaagttcgagaacgaggagttttttaggaagctgagccgcgagtgtgagattaagtacacgggcttcagggaccggccccacgaggaacgccaggcacgcttccagaacgcctgccgcgacggccgctcggaaatcgcttttgtggccacaggaaccaatctgtctctccagttttttccggccagctggcagggagaacagcgacaaacacctagccgagagtatgtcgacttagaaagagaagcaggcaaggtatatttgaaggctcccatgattctgaatggagtctgtgttatctggaaaggctggattgatctccaaagactggatggtatgggctgtctggagtttgatgaggagcgagcccagcaggaggatgcattagcacaacaggcctttgaagaggctcggagaaggacacgcgaatttgaagatagagacaggtctcatcgggaggaaatggaggtgagagtttcacagctgctggcagtaactgaatggagatcaaccaggaaattttcttcattctggataccccctcctcgtggctgtttctgcatagctctgaccagtagggaaaactcaagctgctggtgtgtgttctttcgtctcatttggagtcatctcatgactgcctcctag

SEQ ID NO: 242 - RNA, 609 nt, Homo sapiens
  misc_feature 1..609: note = Homo sapiens__J3KRT0__CBFbeta CDS wt
  source 1..609: mol_type = mRNA
atgccgcgcgtcgtgcccgaccagagaagcaagttcgagaacgaggagttttttaggaagctgagccgcgagtgtgagattaagtacacgggcttcagggaccggccccacgaggaacgccaggcacgcttccagaacgcctgccgcgacggccgctcggaaatcgtaagtcggctggcccggggcgcgcgcgggtcacttgttgcgcggggccgcggcggcccaggccggttccggacggcggcgcggctgctgcggctcccggaactgagtgggcgccgtctcacttcctactcgggattcaaaatgcgaaaccagatgccgcgggccggtactcgcggggagacgcttttcctggggctcgccgcggtggcgcgtgtcggccaacggagcaccgcgagtggagctcgaacccgagccagactaaacaagcgaagggcattgtttaggcggcgacaccgaagaagggttcagggtatttgtagcaagcaaacccccattcggaaaaagaagtggagcttcattcaaggcttttgtggccacaggaaccaatctgtctctccagttttttccggccagctggcagggagaacagcgacaaacacctag

SEQ ID NO: 243 - RNA, 564 nt, Homo sapiens
  misc_feature 1..564: note = Homo sapiens__Q13951-2__CBFbeta CDS wt
  source 1..564: mol_type = mRNA
atgccgcgcgtcgtgcccgaccagagaagcaagttcgagaacgaggagttttttaggaagctgagccgcgagtgtgagattaagtacacgggcttcagggaccggccccacgaggaacgccaggcacgcttccagaacgcctgccgcgacggccgctcggaaatcgcttttgtggccacaggaaccaatctgtctctccagttttttccggccagctggcagggagaacagcgacaaacacctagccgagagtatgtcgacttagaaagagaagcaggcaaggtatatttgaaggctcccatgattctgaatggagtctgtgttatctggaaaggctggattgatctccaaagactggatggtatgggctgtctggagtttgatgaggagcgagcccagcaggaggatgcattagcacaacaggcctttgaagaggctcggagaaggacacgcgaatttgaagatagagacaggtctcatcgggaggaaatggaggcaagaagacaacaagaccctagtcctggttccaatttaggtggtggtgatgacctcaaacttcgttaa

SEQ ID NO: 244 - RNA, 423 nt, Homo sapiens
  misc_feature 1..423: note = Homo sapiens__Q13951-1__CBFbeta(1-141) CDS wt
  source 1..423: mol_type = mRNA
atgccgcgcgtcgtgcccgaccagagaagcaagttcgagaacgaggagttttttaggaagctgagccgcgagtgtgagattaagtacacgggcttcagggaccggccccacgaggaacgccaggcacgcttccagaacgcctgccgcgacggccgctcggaaatcgcttttgtggccacaggaaccaatctgtctctccagttttttccggccagctggcagggagaacagcgacaaacacctagccgagagtatgtcgacttagaaagagaagcaggcaaggtatatttgaaggctcccatgattctgaatggagtctgtgttatctggaaaggctggattgatctccaaagactggatggtatgggctgtctggagtttgatgaggagcgagcccagcaggaggatgcattagcacaacag

SEQ ID NO: 245 - RNA, 495 nt, Homo sapiens
  misc_feature 1..495: note = Homo sapiens__Q13951-1__CBFbeta(1-165) CDS wt
  source 1..495: mol_type = mRNA
atgccgcgcgtcgtgcccgaccagagaagcaagttcgagaacgaggagttttttaggaagctgagccgcgagtgtgagattaagtacacgggcttcagggaccggccccacgaggaacgccaggcacgcttccagaacgcctgccgcgacggccgctcggaaatcgcttttgtggccacaggaaccaatctgtctctccagttttttccggccagctggcagggagaacagcgacaaacacctagccgagagtatgtcgacttagaaagagaagcaggcaaggtatatttgaaggctcccatgattctgaatggagtctgtgttatctggaaaggctggattgatctccaaagactggatggtatgggctgtctggagtttgatgaggagcgagcccagcaggaggatgcattagcacaacaggcctttgaagaggctcggagaaggacacgcgaatttgaagatagagacaggtctcatcgggaggaaatggag

SEQ ID NO: 246 - RNA, 5919 nt, Homo sapiens
  misc_feature 1..5919: note = Homo sapiens__P35749-1__SMMHC CDS wt
  source 1..5919: mol_type = mRNA
atggcgcagaagggccaactcagtgacgatgagaagttcctctttgtggacaaaaacttcatcaacagcccagtggcccaggctgactgggccgccaagagactcgtctgggtcccctcggagaagcagggcttcgaggcagccagcattaaggaggagaagggggatgaggtggttgtggagctggtggagaatggcaagaaggtcacggttgggaaagatgacatccagaagatgaacccacccaagttctccaaggtggaggacatggcggagctgacgtgcctcaacgaagcctccgtgctacacaacctgagggagcggtacttctcagggctaatatatacgtactctggcctcttctgcgtggtggtcaacccctataaacacctgcccatctactcggagaagatcgtcgacatgtacaagggcaagaagaggcacgagatgccgcctcacatctacgccatcgcagacacggcctaccggagcatgcttcaagatcgggaggaccagtccattctatgcacaggcgagtctggagccgggaaaaccgaaaacaccaagaaggtcattcagtacctggccgtggtggcctcctcccacaagggcaagaaagacacaagtatcacgggagagctggaaaagcagcttctacaagcaaacccgattctggaggctttcggcaacgccaaaacagtgaagaacgacaactcctcacgattcggcaaattcatccgcatcaacttcgacgtcacgggttacatcgtgggagccaacattgagacctatctgctagaaaaatcacgggcaattcgccaagccagagacgagaggacattccacatcttttactacatgattgctggagccaaggagaagatgagaagtgacttgcttttggagggcttcaacaactacaccttcctctccaatggctttgtgcccatcccagcagcccaggatgatgagatgttccaggaaaccgtggaggccatggcaatcatgggtttcagcgaggaggagcagctatccatattgaaggtggtatcatcggtcctgcagcttggaaatatcgtcttcaagaaggaaagaaacacagaccaggcgtccatgccagataacacagctgctcagaaagtttgccacctcatgggaattaatgtgacagatttcaccagatccatcctcactcctcgtatcaaggttgggcgagatgtggtacagaaagctcagacaaaagaacaggctgactttgctgtagaggctttggccaaggcaacatatgagcgccttttccgctggatactcacccgcgtgaacaaagccctggacaagacccatcggcaaggggcttccttcctggggatcctggatatagctggatttgagatctttgaggtgaactccttcgagcagctgtgcatcaactacaccaacgagaagctgcagcagctcttcaaccacaccatgttcatcctggagcaggaggagtaccagcgcgagggcatcgagtggaacttcatcgactttgggctggacctacagccctgcatcgagctcatcgagcgaccgaacaaccctccaggtgtgctggccctgctggacgaggaatgctggttccccaaagccacggacaagtctttcgtggagaagctgtgcacggagcagggcagccaccccaagttccagaagcccaagcagctcaaggacaagactgagttctccatcatccattatgctgggaaggtggactataatgcgagtgcctggctgaccaagaatatggacccgctgaatgacaacgtgacttccctgctcaatgcctcctccgacaagtttgtggccgacctgtggaaggacgtggaccgcatcgtgggcctggaccagatggccaagatgacggagagctcgctgcccagcgcctccaagaccaagaagggcatgttccgcacagtggggcagctgtacaaggagcagctgggcaagctgatgaccacgctacgcaacaccacgcccaacttcgtgcgctgcatcatccccaaccacgagaagaggtccggcaagctggatgcgttcctggtgctggagcagctgcggtgcaatggggtgctggaaggcattcgcatctgccggcagggcttccccaaccggatcgtcttccaggagttccgccaacgctacgagatcctggcggcgaatgccatccccaaaggcttcatggacgggaagcaggcctgcattctcatgatcaaagccctggaacttgaccccaacttatacaggatagggcagagcaaaatcttcttccgaactggcgtcctggcccacctagaggaggagcgagatttgaagatcaccgatgtcatcatggccttccaggcgatgtgtcgtggctacttggccagaaaggcttttgccaagaggcagcagcagctgaccgccatgaaggtgattcagaggaactgcgccgcctacctcaagctgcggaactggcagtggtggaggcttttcaccaaagtgaagccactgctgcaggtgacacggcaggaggaggagatgcaggccaaggaggatgaactgcagaagaccaaggagcggcagcagaaggcagagaatgagcttaaggagctggaacagaagcactcgcagctgaccgaggagaagaacctgctacaggaacagctgcaggcagagacagagctgtatgcagaggctgaggagatgcgggtgcggctggcggccaagaagcaggagctggaggagatactgcatgagatggaggcccgcctggaggaggaggaagacaggggccagcagctacaggctgaaaggaagaagatggcccagcagatgctggaccttgaagaacagctggaggaggaggaagctgccaggcagaagctgcaacttgagaaggtcacggctgaggccaagatcaagaaactggaggatgagatcctggtcatggatgatcagaacaataaactatcaaaagaacgaaaactccttgaggagaggattagtgacttaacgacaaatcttgcagaagaggaagaaaaggccaagaatcttaccaagctgaaaaacaagcatgaatctatgatttcagaactggaagtgcggctaaagaaggaagagaagagccgacaggagctggagaagctgaaacggaagctggagggtgatgccagcgacttccacgagcagatcgctgacctccaggcgcagatcgcagagctcaagatgcagctggccaagaaggaggaggagctgcaggcggccctggccaggcttgacgatgaaatcgctcagaagaacaatgccctgaagaagatccgggagctggagggccacatctcagacctccaggaggacctggactcagagcgggccgccaggaacaaggctgaaaagcagaagcgagacctcggcgaggagctggaggccctaaagacagagctggaagacacactggacagcacagccactcagcaggagctcagggccaagagggagcaggaggtgacggtgctgaagaaggccctggatgaagagacgcggtcccatgaggctcaggtccaggagatgaggcagaaacacgcacaggcggtggaggagctcacagagcagcttgagcagttcaagagggccaaggcgaacctagacaagaataagcagacgctggagaaagagaacgcagacctggccggggagctgcgggtcctgggccaggccaagcaggaggtggaacataagaagaagaagctggaggcgcaggtgcaggagctgcagtccaagtgcagcgatggggagcgggcccgggcggagctcaatgacaaagtccacaagctgcagaatgaagttgagagcgtcacagggatgcttaacgaggccgaggggaaggccattaagctggccaaggacgtggcgtccctcagttcccagctccaggacacccaggagctgcttcaagaagaaacccggcagaagctcaacgtgtctacgaagctgcgccagctggaggaggagcggaacagcctgcaagaccagctggacgaggagatggaggccaagcagaacctggagcgccacatctccactctcaacatccagctctccgactcgaagaagaagctgcaggactttgccagcaccgtggaagctctggaagaggggaagaagaggttccagaaggagatcgagaacctcacccagcagtacgaggagaaggcggccgcttatgataaactggaaaagaccaagaacaggcttcagcaggagctggacgacctggttgttgatttggacaaccagcggcaactcgtgtccaacctggaaaagaagcagaggaaatttgatcagttgttagccgaggagaaaaacatctcttccaaatacgcggatgagagggacagagctgaggcagaagccagggagaaggaaaccaaggccctgtccctggctcgggcccttgaagaggccttggaagccaaagaggaactcgagcggaccaacaaaatgctcaaagccgaaatggaagacctggtcagctccaaggatgacgtgggcaagaacgtccatgagctggagaagtccaagcgggccctggagacccagatggaggagatgaagacgcagctggaagagctggaggacgagctgcaagccacggaggacgccaaactgcggctggaagtcaacatgcaggcgctcaagggccagttcgaaagggatctccaagcccgggacgagcagaatgaggagaagaggaggcaactgcagagacagcttcacgagtatgagacggaactggaagacgagcgaaagcaacgtgccctggcagctgcagcaaagaagaagctggaaggggacctgaaagacctggagcttcaggccgactctgccatcaaggggagggaggaagccatcaagcagctacgcaaactgcaggctcagatgaaggactttcaaagagagctggaagatgcccgtgcctccagagatgagatctttgccacagccaaagagaatgagaagaaagccaagagcttggaagcagacctcatgcagctacaagaggacctcgccgccgctgagagggctcgcaaacaagcggacctcgagaaggaggaactggcagaggagctggccagtagcctgtcgggaaggaacgcactccaggacgagaagcgccgcctggaggcccggatcgcccagctggaggaggagctggaggaggagcagggcaacatggaggccatgagcgaccgggtccgcaaagccacacagcaggccgagcagctcagcaacgagctggccacagagcgcagcacggcccagaagaatgagagtgcccggcagcagctcgagcggcagaacaaggagctccggagcaagctccacgagatggagggggccgtcaagtccaagttcaagtccaccatcgcggcgctggaggccaagattgcacagctggaggagcaggtcgagcaggaggccagagagaaacaggcggccaccaagtcgctgaagcagaaagacaagaagctgaaggaaatcttgctgcaggtggaggacgagcgcaagatggccgagcagtacaaggagcaggcagagaaaggcaatgccagggtcaagcagctcaagaggcagctggaggaggcagaggaggagtcccagcgcatcaacgccaaccgcaggaagctgcagcgggagctggatgaggccacggagagcaacgaggccatgggccgcgaggtgaacgcactcaagagcaagctcaggcgaggaaacgagacctctttcgttccttctagaaggtctggaggacgtagagttattgaaaatgcagatggttctgaggaggaaacggacactcgagacgcagacttcaatggaaccaaggccagtgaataa

SEQ ID NO: 247 - RNA, 5940 nt, Homo sapiens
  misc_feature 1..5940: note = Homo sapiens__P35749-2__SMMHC CDS wt
  source 1..5940: mol_type = mRNA
atggcgcagaagggccaactcagtgacgatgagaagttcctctttgtggacaaaaacttcatcaacagcccagtggcccaggctgactgggccgccaagagactcgtctgggtcccctcggagaagcagggcttcgaggcagccagcattaaggaggagaagggggatgaggtggttgtggagctggtggagaatggcaagaaggtcacggttgggaaagatgacatccagaagatgaacccacccaagttctccaaggtggaggacatggcggagctgacgtgcctcaacgaagcctccgtgctacacaacctgagggagcggtacttctcagggctaatatatacgtactctggcctcttctgcgtggtggtcaacccctataaacacctgcccatctactcggagaagatcgtcgacatgtacaagggcaagaagaggcacgagatgccgcctcacatctacgccatcgcagacacggcctaccggagcatgcttcaagatcgggaggaccagtccattctatgcacaggcgagtctggagccgggaaaaccgaaaacaccaagaaggtcattcagtacctggccgtggtggcctcctcccacaagggcaagaaagacacaagtatcacgcaaggcccatcttttgcctacggagagctggaaaagcagcttctacaagcaaacccgattctggaggctttcggcaacgccaaaacagtgaagaacgacaactcctcacgattcggcaaattcatccgcatcaacttcgacgtcacgggttacatcgtgggagccaacattgagacctatctgctagaaaaatcacgggcaattcgccaagccagagacgagaggacattccacatcttttactacatgattgctggagccaaggagaagatgagaagtgacttgcttttggagggcttcaacaactacaccttcctctccaatggctttgtgcccatcccagcagcccaggatgatgagatgttccaggaaaccgtggaggccatggcaatcatgggtttcagcgaggaggagcagctatccatattgaaggtggtatcatcggtcctgcagcttggaaatatcgtcttcaagaaggaaagaaacacagaccaggcgtccatgccagataacacagctgctcagaaagtttgccacctcatgggaattaatgtgacagatttcaccagatccatcctcactcctcgtatcaaggttgggcgagatgtggtacagaaagctcagacaaaagaacaggctgactttgctgtagaggctttggccaaggcaacatatgagcgccttttccgctggatactcacccgcgtgaacaaagccctggacaagacccatcggcaaggggcttccttcctggggatcctggatatagctggatttgagatctttgaggtgaactccttcgagcagctgtgcatcaactacaccaacgagaagctgcagcagctcttcaaccacaccatgttcatcctggagcaggaggagtaccagcgcgagggcatcgagtggaacttcatcgactttgggctggacctacagccctgcatcgagctcatcgagcgaccgaacaaccctccaggtgtgctggccctgctggacgaggaatgctggttccccaaagccacggacaagtctttcgtggagaagctgtgcacggagcagggcagccaccccaagttccagaagcccaagcagctcaaggacaagactgagttctccatcatccattatgctgggaaggtggactataatgcgagtgcctggctgaccaagaatatggacccgctgaatgacaacgtgacttccctgctcaatgcctcctccgacaagtttgtggccgacctgtggaaggacgtggaccgcatcgtgggcctggaccagatggccaagatgacggagagctcgctgcccagcgcctccaagaccaagaagggcatgttccgcacagtggggcagctgtacaaggagcagctgggcaagctgatgaccacgctacgcaacaccacgcccaacttcgtgcgctgcatcatccccaaccacgagaagaggtccggcaagctggatgcgttcctggtgctggagcagctgcggtgcaatggggtgctggaaggcattcgcatctgccggcagggcttccccaaccggatcgtcttccaggagttccgccaacgctacgagatcctggcggcgaatgccatccccaaaggcttcatggacgggaagcaggcctgcattctcatgatcaaagccctggaacttgaccccaacttatacaggatagggcagagcaaaatcttcttccgaactggcgtcctggcccacctagaggaggagcgagatttgaagatcaccgatgtcatcatggccttccaggcgatgtgtcgtggctacttggccagaaaggcttttgccaagaggcagcagcagctgaccgccatgaaggtgattcagaggaactgcgccgcctacctcaagctgcggaactggcagtggtggaggcttttcaccaaagtgaagccactgctgcaggtgacacggcaggaggaggagatgcaggccaaggaggatgaactgcagaagaccaaggagcggcagcagaaggcagagaatgagcttaaggagctggaacagaagcactcgcagctgaccgaggagaagaacctgctacaggaacagctgcaggcagagacagagctgtatgcagaggctgaggagatgcgggtgcggctggcggccaagaagcaggagctggaggagatactgcatgagatggaggcccgcctggaggaggaggaagacaggggccagcagctacaggctgaaaggaagaagatggcccagcagatgctggaccttgaagaacagctggaggaggaggaagctgccaggcagaagctgcaacttgagaaggtcacggctgaggccaagatcaagaaactggaggatgagatcctggtcatggatgatcagaacaataaactatcaaaagaacgaaaactccttgaggagaggattagtgacttaacgacaaatcttgcagaagaggaagaaaaggccaagaatcttaccaagctgaaaaacaagcatgaatctatgatttcagaactggaagtgcggctaaagaaggaagagaagagccgacaggagctggagaagctgaaacggaagctggagggtgatgccagcgacttccacgagcagatcgctgacctccaggcgcagatcgcagagctcaagatgcagctggccaagaaggaggaggagctgcaggcggccctggccaggcttgacgatgaaatcgctcagaagaacaatgccctgaagaagatccgggagctggagggccacatctcagacctccaggaggacctggactcagagcgggccgccaggaacaaggctgaaaagcagaagcgagacctcggcgaggagctggaggccctaaagacagagctggaagacacactggacagcacagccactcagcaggagctcagggccaagagggagcaggaggtgacggtgctgaagaaggccctggatgaagagacgcggtcccatgaggctcaggtccaggagatgaggcagaaacacgcacaggcggtggaggagctcacagagcagcttgagcagttcaagagggccaaggcgaacctagacaagaataagcagacgctggagaaagagaacgcagacctggccggggagctgcgggtcctgggccaggccaagcaggaggtggaacataagaagaagaagctggaggcgcaggtgcaggagctgcagtccaagtgcagcgatggggagcgggcccgggcggagctcaatgacaaagtccacaagctgcagaatgaagttgagagcgtcacagggatgcttaacgaggccgaggggaaggccattaagctggccaaggacgtggcgtccctcagttcccagctccaggacacccaggagctgcttcaagaagaaacccggcagaagctcaacgtgtctacgaagctgcgccagctggaggaggagcggaacagcctgcaagaccagctggacgaggagatggaggccaagcagaacctggagcgccacatctccactctcaacatccagctctccgactcgaagaagaagctgcaggactttgccagcaccgtggaagctctggaagaggggaagaagaggttccagaaggagatcgagaacctcacccagcagtacgaggagaaggcggccgcttatgataaactggaaaagaccaagaacaggcttcagcaggagctggacgacctggttgttgatttggacaaccagcggcaactcgtgtccaacctggaaaagaagcagaggaaatttgatcagttgttagccgaggagaaaaacatctcttccaaatacgcggatgagagggacagagctgaggcagaagccagggagaaggaaaccaaggccctgtccctggctcgggcccttgaagaggccttggaagccaaagaggaactcgagcggaccaacaaaatgctcaaagccgaaatggaagacctggtcagctccaaggatgacgtgggcaagaacgtccatgagctggagaagtccaagcgggccctggagacccagatggaggagatgaagacgcagctggaagagctggaggacgagctgcaagccacggaggacgccaaactgcggctggaagtcaacatgcaggcgctcaagggccagttcgaaagggatctccaagcccgggacgagcagaatgaggagaagaggaggcaactgcagagacagcttcacgagtatgagacggaactggaagacgagcgaaagcaacgtgccctggcagctgcagcaaagaagaagctggaaggggacctgaaagacctggagcttcaggccgactctgccatcaaggggagggaggaagccatcaagcagctacgcaaactgcaggctcagatgaaggactttcaaagagagctggaagatgcccgtgcctccagagatgagatctttgccacagccaaagagaatgagaagaaagccaagagcttggaagcagacctcatgcagctacaagaggacctcgccgccgctgagagggctcgcaaacaagcggacctcgagaaggaggaactggcagaggagctggccagtagcctgtcgggaaggaacgcactccaggacgagaagcgccgcctggaggcccggatcgcccagctggaggaggagctggaggaggagcagggcaacatggaggccatgagcgaccgggtccgcaaagccacacagcaggccgagcagctcagcaacgagctggccacagagcgcagcacggcccagaagaatgagagtgcccggcagcagctcgagcggcagaacaaggagctccggagcaagctccacgagatggagggggccgtcaagtccaagttcaagtccaccatcgcggcgctggaggccaagattgcacagctggaggagcaggtcgagcaggaggccagagagaaacaggcggccaccaagtcgctgaagcagaaagacaagaagctgaaggaaatcttgctgcaggtggaggacgagcgcaagatggccgagcagtacaaggagcaggcagagaaaggcaatgccagggtcaagcagctcaagaggcagctggaggaggcagaggaggagtcccagcgcatcaacgccaaccgcaggaagctgcagcgggagctggatgaggccacggagagcaacgaggccatgggccgcgaggtgaacgcactcaagagcaagctcaggcgaggaaacgagacctctttcgttccttctagaaggtctggaggacgtagagttattgaaaatgcagatggttctgaggaggaaacggacactcgagacgcagacttcaatggaaccaaggccagtgaataa

SEQ ID NO: 248 - RNA, 5838 nt, Homo sapiens
  misc_feature 1..5838: note = Homo sapiens__P35749-3__SMMHC CDS wt
  source 1..5838: mol_type = mRNA
atggcgcagaagggccaactcagtgacgatgagaagttcctctttgtggacaaaaacttcatcaacagcccagtggcccaggctgactgggccgccaagagactcgtctgggtcccctcggagaagcagggcttcgaggcagccagcattaaggaggagaagggggatgaggtggttgtggagctggtggagaatggcaagaaggtcacggttgggaaagatgacatccagaagatgaacccacccaagttctccaaggtggaggacatggcggagctgacgtgcctcaacgaagcctccgtgctacacaacctgagggagcggtacttctcagggctaatatatacgtactctggcctcttctgcgtggtggtcaacccctataaacacctgcccatctactcggagaagatcgtcgacatgtacaagggcaagaagaggcacgagatgccgcctcacatctacgccatcgcagacacggcctaccggagcatgcttcaagatcgggaggaccagtccattctatgcacaggcgagtctggagccgggaaaaccgaaaacaccaagaaggtcattcagtacctggccgtggtggcctcctcccacaagggcaagaaagacacaagtatcacgcaaggcccatcttttgcctacggagagctggaaaagcagcttctacaagcaaacccgattctggaggctttcggcaacgccaaaacagtgaagaacgacaactcctcacgattcggcaaattcatccgcatcaacttcgacgtcacgggttacatcgtgggagccaacattgagacctatctgctagaaaaatcacgggcaattcgccaagccagagacgagaggacattccacatcttttactacatgattgctggagccaaggagaagatgagaagtgacttgcttttggagggcttcaacaactacaccttcctctccaatggctttgtgcccatcccagcagcccaggatgatgagatgttccaggaaaccgtggaggccatggcaatcatgggtttcagcgaggaggagcagctatccatattgaaggtggtatcatcggtcctgcagcttggaaatatcgtcttcaagaaggaaagaaacacagaccaggcgtccatgccagataacacagctgctcagaaagtttgccacctcatgggaattaatgtgacagatttcaccagatccatcctcactcctcgtatcaaggttgggcgagatgtggtacagaaagctcagacaaaagaacaggctgactttgctgtagaggctttggccaaggcaacatatgagcgccttttccgctggatactcacccgcgtgaacaaagccctggacaagacccatcggcaaggggcttccttcctggggatcctggatatagctggatttgagatctttgaggtgaactccttcgagcagctgtgcatcaactacaccaacgagaagctgcagcagctcttcaaccacaccatgttcatcctggagcaggaggagtaccagcgcgagggcatcgagtggaacttcatcgactttgggctggacctacagccctgcatcgagctcatcgagcgaccgaacaaccctccaggtgtgctggccctgctggacgaggaatgctggttccccaaagccacggacaagtctttcgtggagaagctgtgcacggagcagggcagccaccccaagttccagaagcccaagcagctcaaggacaagactgagttctccatcatccattatgctgggaaggtggactataatgcgagtgcctggctgaccaagaatatggacccgctgaatgacaacgtgacttccctgctcaatgcctcctccgacaagtttgtggccgacctgtggaaggacgtggaccgcatcgtgggcctggaccagatggccaagatgacggagagctcgctgcccagcgcctccaagaccaagaagggcatgttccgcacagtggggcagctgtacaaggagcagctgggcaagctgatgaccacgctacgcaacaccacgcccaacttcgtgcgctgcatcatccccaaccacgagaagaggtccggcaagctggatgcgttcctggtgctggagcagctgcggtgcaatggggtgctggaaggcattcgcatctgccggcagggcttccccaaccggatcgtcttccaggagttccgccaacgctacgagatcctggcggcgaatgccatccccaaaggcttcatggacgggaagcaggcctgcattctcatgatcaaagccctggaacttgaccccaacttatacaggatagggcagagcaaaatcttcttccgaactggcgtcctggcccacctagaggaggagcgagatttgaagatcaccgatgtcatcatggccttccaggcgatgtgtcgtggctacttggccagaaaggcttttgccaagaggcagcagcagctgaccgccatgaaggtgattcagaggaactgcgccgcctacctcaagctgcggaactggcagtggtggaggcttttcaccaaagtgaagccactgctgcaggtgacacggcaggaggaggagatgcaggccaaggaggatgaactgcagaagaccaaggagcggcagcagaaggcagagaatgagcttaaggagctggaacagaagcactcgcagctgaccgaggagaagaacctgctacaggaacagctgcaggcagagacagagctgtatgcagaggctgaggagatgcgggtgcggctggcggccaagaagcaggagctggaggagatactgcatgagatggaggcccgcctggaggaggaggaagacaggggccagcagctacaggctgaaaggaagaagatggcccagcagatgctggaccttgaagaacagctggaggaggaggaagctgccaggcagaagctgcaacttgagaaggtcacggctgaggccaagatcaagaaactggaggatgagatcctggtcatggatgatcagaacaataaactatcaaaagaacgaaaactccttgaggagaggattagtgacttaacgacaaatcttgcagaagaggaagaaaaggccaagaatcttaccaagctgaaaaacaagcatgaatctatgatttcagaactggaagtgcggctaaagaaggaagagaagagccgacaggagctggagaagctgaaacggaagctggagggtgatgccagcgacttccacgagcagatcgctgacctccaggcgcagatcgcagagctcaagatgcagctggccaagaaggaggaggagctgcaggcggccctggccaggcttgacgatgaaatcgctcagaagaacaatgccctgaagaagatccgggagctggagggccacatctcagacctccaggaggacctggactcagagcgggccgccaggaacaaggctgaaaagcagaagcgagacctcggcgaggagctggaggccctaaagacagagctggaagacacactggacagcacagccactcagcaggagctcagggccaagagggagcaggaggtgacggtgctgaagaaggccctggatgaagagacgcggtcccatgaggctcaggtccaggagatgaggcagaaacacgcacaggcggtggaggagctcacagagcagcttgagcagttcaagagggccaaggcgaacctagacaagaataagcagacgctggagaaagagaacgcagacctggccggggagctgcgggtcctgggccaggccaagcaggaggtggaacataagaagaagaagctggaggcgcaggtgcaggagctgcagtccaagtgcagcgatggggagcgggcccgggcggagctcaatgacaaagtccacaagctgcagaatgaagttgagagcgtcacagggatgcttaacgaggccgaggggaaggccattaagctggccaaggacgtggcgtccctcagttcccagctccaggacacccaggagctgcttcaagaagaaacccggcagaagctcaacgtgtctacgaagctgcgccagctggaggaggagcggaacagcctgcaagaccagctggacgaggagatggaggccaagcagaacctggagcgccacatctccactctcaacatccagctctccgactcgaagaagaagctgcaggactttgccagcaccgtggaagctctggaagaggggaagaagaggttccagaaggagatcgagaacctcacccagcagtacgaggagaaggcggccgcttatgataaactggaaaagaccaagaacaggcttcagcaggagctggacgacctggttgttgatttggacaaccagcggcaactcgtgtccaacctggaaaagaagcagaggaaatttgatcagttgttagccgaggagaaaaacatctcttccaaatacgcggatgagagggacagagctgaggcagaagccagggagaaggaaaccaaggccctgtccctggctcgggcccttgaagaggccttggaagccaaagaggaactcgagcggaccaacaaaatgctcaaagccgaaatggaagacctggtcagctccaaggatgacgtgggcaagaacgtccatgagctggagaagtccaagcgggccctggagacccagatggaggagatgaagacgcagctggaagagctggaggacgagctgcaagccacggaggacgccaaactgcggctggaagtcaacatgcaggcgctcaagggccagttcgaaagggatctccaagcccgggacgagcagaatgaggagaagaggaggcaactgcagagacagcttcacgagtatgagacggaactggaagacgagcgaaagcaacgtgccctggcagctgcagcaaagaagaagctggaaggggacctgaaagacctggagcttcaggccgactctgccatcaaggggagggaggaagccatcaagcagctacgcaaactgcaggctcagatgaaggactttcaaagagagctggaagatgcccgtgcctccagagatgagatctttgccacagccaaagagaatgagaagaaagccaagagcttggaagcagacctcatgcagctacaagaggacctcgccgccgctgagagggctcgcaaacaagcggacctcgagaaggaggaactggcagaggagctggccagtagcctgtcgggaaggaacgcactccaggacgagaagcgccgcctggaggcccggatcgcccagctggaggaggagctggaggaggagcagggcaacatggaggccatgagcgaccgggtccgcaaagccacacagcaggccgagcagctcagcaacgagctggccacagagcgcagcacggcccagaagaatgagagtgcccggcagcagctcgagcggcagaacaaggagctccggagcaagctccacgagatggagggggccgtcaagtccaagttcaagtccaccatcgcggcgctggaggccaagattgcacagctggaggagcaggtcgagcaggaggccagagagaaacaggcggccaccaagtcgctgaagcagaaagacaagaagctgaaggaaatcttgctgcaggtggaggacgagcgcaagatggccgagcagtacaaggagcaggcagagaaaggcaatgccagggtcaagcagctcaagaggcagctggaggaggcagaggaggagtcccagcgcatcaacgccaaccgcaggaagctgcagcgggagctggatgaggccacggagagcaacgaggccatgggccgcgaggtgaacgcactcaagagcaagctcagagggccccccccacaggaaacttcgcagtga

SEQ ID NO: 249 - RNA, 5817 nt, Homo sapiens
  misc_feature 1..5817: note = Homo sapiens__P35749-4__SMMHC CDS wt
  source 1..5817: mol_type = mRNA
atggcgcagaagggccaactcagtgacgatgagaagttcctctttgtggacaaaaacttcatcaacagcccagtggcccaggctgactgggccgccaagagactcgtctgggtcccctcggagaagcagggcttcgaggcagccagcattaaggaggagaagggggatgaggtggttgtggagctggtggagaatggcaagaaggtcacggttgggaaagatgacatccagaagatgaacccacccaagttctccaaggtggaggacatggcggagctgacgtgcctcaacgaagcctccgtgctacacaacctgagggagcggtacttctcagggctaatatatacgtactctggcctcttctgcgtggtggtcaacccctataaacacctgcccatctactcggagaagatcgtcgacatgtacaagggcaagaagaggcacgagatgccgcctcacatctacgccatcgcagacacggcctaccggagcatgcttcaagatcgggaggaccagtccattctatgcacaggcgagtctggagccgggaaaaccgaaaacaccaagaaggtcattcagtacctggccgtggtggcctcctcccacaagggcaagaaagacacaagtatcacgggagagctggaaaagcagcttctacaagcaaacccgattctggaggctttcggcaacgccaaaacagtgaagaacgacaactcctcacgattcggcaaattcatccgcatcaacttcgacgtcacgggttacatcgtgggagccaacattgagacctatctgctagaaaaatcacgggcaattcgccaagccagagacgagaggacattccacatcttttactacatgattgctggagccaaggagaagatgagaagtgacttgcttttggagggcttcaacaactacaccttcctctccaatggctttgtgcccatcccagcagcccaggatgatgagatgttccaggaaaccgtggaggccatggcaatcatgggtttcagcgaggaggagcagctatccatattgaaggtggtatcatcggtcctgcagcttggaaatatcgtcttcaagaaggaaagaaacacagaccaggcgtccatgccagataacacagctgctcagaaagtttgccacctcatgggaattaatgtgacagatttcaccagatccatcctcactcctcgtatcaaggttgggcgagatgtggtacagaaagctcagacaaaagaacaggctgactttgctgtagaggctttggccaaggcaacatatgagcgccttttccgctggatactcacccgcgtgaacaaagccctggacaagacccatcggcaaggggcttccttcctggggatcctggatatagctggatttgagatctttgaggtgaactccttcgagcagctgtgcatcaactacaccaacgagaagctgcagcagctcttcaaccacaccatgttcatcctggagcaggaggagtaccagcgcgagggcatcgagtggaacttcatcgactttgggctggacctacagccctgcatcgagctcatcgagcgaccgaacaaccctccaggtgtgctggccctgctggacgaggaatgctggttccccaaagccacggacaagtctttcgtggagaagctgtgcacggagcagggcagccaccccaagttccagaagcccaagcagctcaaggacaagactgagttctccatcatccattatgctgggaaggtggactataatgcgagtgcctggctgaccaagaatatggacccgctgaatgacaacgtgacttccctgctcaatgcctcctccgacaagtttgtggccgacctgtggaaggacgtggaccgcatcgtgggcctggaccagatggccaagatgacggagagctcgctgcccagcgcctccaagaccaagaagggcatgttccgcacagtggggcagctgtacaaggagcagctgggcaagctgatgaccacgctacgcaacaccacgcccaacttcgtgcgctgcatcatccccaaccacgagaagaggtccggcaagctggatgcgttcctggtgctggagcagctgcggtgcaatggggtgctggaaggcattcgcatctgccggcagggcttccccaaccggatcgtcttccaggagttccgccaacgctacgagatcctggcggcgaatgccatccccaaaggcttcatggacgggaagcaggcctgcattctcatgatcaaagccctggaacttgaccccaacttatacaggatagggcagagcaaaatcttcttccgaactggcgtcctggcccacctagaggaggagcgagatttgaagatcaccgatgtcatcatggccttccaggcgatgtgtcgtggctacttggccagaaaggcttttgccaagaggcagcagcagctgaccgccatgaaggtgattcagaggaactgcgccgcctacctcaagctgcggaactggcagtggtggaggcttttcaccaaagtgaagccactgctgcaggtgacacggcaggaggaggagatgcaggccaaggaggatgaactgcagaagaccaaggagcggcagcagaaggcagagaatgagcttaaggagctggaacagaagcactcgcagctgaccgaggagaagaacctgctacaggaacagctgcaggcagagacagagctgtatgcagaggctgaggagatgcgggtgcggctggcggccaagaagcaggagctggaggagatactgcatgagatggaggcccgcctggaggaggaggaagacaggggccagcagctacaggctgaaaggaagaagatggcccagcagatgctggaccttgaagaacagctggaggaggaggaagctgccaggcagaagctgcaacttgagaaggtcacggctgaggccaagatcaagaaactggaggatgagatcctggtcatggatgatcagaacaataaactatcaaaagaacgaaaactccttgaggagaggattagtgacttaacgacaaatcttgcagaagaggaagaaaaggccaagaatcttaccaagctgaaaaacaagcatgaatctatgatttcagaactggaagtgcggctaaagaaggaagagaagagccgacaggagctggagaagctgaaacggaagctggagggtgatgccagcgacttccacgagcagatcgctgacctccaggcgcagatcgcagagctcaagatgcagctggccaagaaggaggaggagctgcaggcggccctggccaggcttgacgatgaaatcgctcagaagaacaatgccctgaagaagatccgggagctggagggccacatctcagacctccaggaggacctggactcagagcgggccgccaggaacaaggctgaaaagcagaagcgagacctcggcgaggagctggaggccctaaagacagagctggaagacacactggacagcacagccactcagcaggagctcagggccaagagggagcaggaggtgacggtgctgaagaaggccctggatgaagagacgcggtcccatgaggctcaggtccaggagatgaggcagaaacacgcacaggcggtggaggagctcacagagcagcttgagcagttcaagagggccaaggcgaacctagacaagaataagcagacgctggagaaagagaacgcagacctggccggggagctgcgggtcctgggccaggccaagcaggaggtggaacataagaagaagaagctggaggcgcaggtgcaggagctgcagtccaagtgcagcgatggggagcgggcccgggcggagctcaatgacaaagtccacaagctgcagaatgaagttgagagcgtcacagggatgcttaacgaggccgaggggaaggccattaagctggccaaggacgtggcgtccctcagttcccagctccaggacacccaggagctgcttcaagaagaaacccggcagaagctcaacgtgtctacgaagctgcgccagctggaggaggagcggaacagcctgcaagaccagctggacgaggagatggaggccaagcagaacctggagcgccacatctccactctcaacatccagctctccgactcgaagaagaagctgcaggactttgccagcaccgtggaagctctggaagaggggaagaagaggttccagaaggagatcgagaacctcacccagcagtacgaggagaaggcggccgcttatgataaactggaaaagaccaagaacaggcttcagcaggagctggacgacctggttgttgatttggacaaccagcggcaactcgtgtccaacctggaaaagaagcagaggaaatttgatcagttgttagccgaggagaaaaacatctcttccaaatacgcggatgagagggacagagctgaggcagaagccagggagaaggaaaccaaggccctgtccctggctcgggcccttgaagaggccttggaagccaaagaggaactcgagcggaccaacaaaatgctcaaagccgaaatggaagacctggtcagctccaaggatgacgtgggcaagaacgtccatgagctggagaagtccaagcgggccctggagacccagatggaggagatgaagacgcagctggaagagctggaggacgagctgcaagccacggaggacgccaaactgcggctggaagtcaacatgcaggcgctcaagggccagttcgaaagggatctccaagcccgggacgagcagaatgaggagaagaggaggcaactgcagagacagcttcacgagtatgagacggaactggaagacgagcgaaagcaacgtgccctggcagctgcagcaaagaagaagctggaaggggacctgaaagacctggagcttcaggccgactctgccatcaaggggagggaggaagccatcaagcagctacgcaaactgcaggctcagatgaaggactttcaaagagagctggaagatgcccgtgcctccagagatgagatctttgccacagccaaagagaatgagaagaaagccaagagcttggaagcagacctcatgcagctacaagaggacctcgccgccgctgagagggctcgcaaacaagcggacctcgagaaggaggaactggcagaggagctggccagtagcctgtcgggaaggaacgcactccaggacgagaagcgccgcctggaggcccggatcgcccagctggaggaggagctggaggaggagcagggcaacatggaggccatgagcgaccgggtccgcaaagccacacagcaggccgagcagctcagcaacgagctggccacagagcgcagcacggcccagaagaatgagagtgcccggcagcagctcgagcggcagaacaaggagctccggagcaagctccacgagatggagggggccgtcaagtccaagttcaagtccaccatcgcggcgctggaggccaagattgcacagctggaggagcaggtcgagcaggaggccagagagaaacaggcggccaccaagtcgctgaagcagaaagacaagaagctgaaggaaatcttgctgcaggtggaggacgagcgcaagatggccgagcagtacaaggagcaggcagagaaaggcaatgccagggtcaagcagctcaagaggcagctggaggaggcagaggaggagtcccagcgcatcaacgccaaccgcaggaagctgcagcgggagctggatgaggccacggagagcaacgaggccatgggccgcgaggtgaacgcactcaagagcaagctcagagggccccccccacaggaaacttcgcagtga

SEQ ID NO: 250 - RNA, 1338 nt, Homo sapiens
  misc_feature 1..1338: note = Homo sapiens__P35749-1__SMMHC(1527-1972) CDS wt
  source 1..1338: mol_type = mRNA
gtccatgagctggagaagtccaagcgggccctggagacccagatggaggagatgaagacgcagctggaagagctggaggacgagctgcaagccacggaggacgccaaactgcggctggaagtcaacatgcaggcgctcaagggccagttcgaaagggatctccaagcccgggacgagcagaatgaggagaagaggaggcaactgcagagacagcttcacgagtatgagacggaactggaagacgagcgaaagcaacgtgccctggcagctgcagcaaagaagaagctggaaggggacctgaaagacctggagcttcaggccgactctgccatcaaggggagggaggaagccatcaagcagctacgcaaactgcaggctcagatgaaggactttcaaagagagctggaagatgcccgtgcctccagagatgagatctttgccacagccaaagagaatgagaagaaagccaagagcttggaagcagacctcatgcagctacaagaggacctcgccgccgctgagagggctcgcaaacaagcggacctcgagaaggaggaactggcagaggagctggccagtagcctgtcgggaaggaacgcactccaggacgagaagcgccgcctggaggcccggatcgcccagctggaggaggagctggaggaggagcagggcaacatggaggccatgagcgaccgggtccgcaaagccacacagcaggccgagcagctcagcaacgagctggccacagagcgcagcacggcccagaagaatgagagtgcccggcagcagctcgagcggcagaacaaggagctccggagcaagctccacgagatggagggggccgtcaagtccaagttcaagtccaccatcgcggcgctggaggccaagattgcacagctggaggagcaggtcgagcaggaggccagagagaaacaggcggccaccaagtcgctgaagcagaaagacaagaagctgaaggaaatcttgctgcaggtggaggacgagcgcaagatggccgagcagtacaaggagcaggcagagaaaggcaatgccagggtcaagcagctcaagaggcagctggaggaggcagaggaggagtcccagcgcatcaacgccaaccgcaggaagctgcagcgggagctggatgaggccacggagagcaacgaggccatgggccgcgaggtgaacgcactcaagagcaagctcaggcgaggaaacgagacctctttcgttccttctagaaggtctggaggacgtagagttattgaaaatgcagatggttctgaggaggaaacggacactcgagacgcagacttcaatggaaccaaggccagtgaa

SEQ ID NO: 251 - RNA, 1053 nt, Homo sapiens
  misc_feature 1..1053: note = Homo sapiens__P35749-1__SMMHC(1527-1877) CDS wt
  source 1..1053: mol_type = mRNA
gtccatgagctggagaagtccaagcgggccctggagacccagatggaggagatgaagacgcagctggaagagctggaggacgagctgcaagccacggaggacgccaaactgcggctggaagtcaacatgcaggcgctcaagggccagttcgaaagggatctccaagcccgggacgagcagaatgaggagaagaggaggcaactgcagagacagcttcacgagtatgagacggaactggaagacgagcgaaagcaacgtgccctggcagctgcagcaaagaagaagctggaaggggacctgaaagacctggagcttcaggccgactctgccatcaaggggagggaggaagccatcaagcagctacgcaaactgcaggctcagatgaaggactttcaaagagagctggaagatgcccgtgcctccagagatgagatctttgccacagccaaagagaatgagaagaaagccaagagcttggaagcagacctcatgcagctacaagaggacctcgccgccgctgagagggctcgcaaacaagcggacctcgagaaggaggaactggcagaggagctggccagtagcctgtcgggaaggaacgcactccaggacgagaagcgccgcctggaggcccggatcgcccagctggaggaggagctggaggaggagcagggcaacatggaggccatgagcgaccgggtccgcaaagccacacagcaggccgagcagctcagcaacgagctggccacagagcgcagcacggcccagaagaatgagagtgcccggcagcagctcgagcggcagaacaaggagctccggagcaagctccacgagatggagggggccgtcaagtccaagttcaagtccaccatcgcggcgctggaggccaagattgcacagctggaggagcaggtcgagcaggaggccagagagaaacaggcggccaccaagtcgctgaagcagaaagacaagaagctgaaggaaatcttgctgcaggtggaggacgagcgcaagatggccgagcagtacaaggagcaggcagagaaaggcaatgcc

SEQ ID NO: 252 - RNA, 492 nt, Homo sapiens
  misc_feature 1..492: note = Homo sapiens__P35749-1__SMMHC(1809-1972) CDS wt
  source 1..492: mol_type = mRNA
aagtccaagttcaagtccaccatcgcggcgctggaggccaagattgcacagctggaggagcaggtcgagcaggaggccagagagaaacaggcggccaccaagtcgctgaagcagaaagacaagaagctgaaggaaatcttgctgcaggtggaggacgagcgcaagatggccgagcagtacaaggagcaggcagagaaaggcaatgccagggtcaagcagctcaagaggcagctggaggaggcagaggaggagtcccagcgcatcaacgccaaccgcaggaagctgcagcgggagctggatgaggccacggagagcaacgaggccatgggccgcgaggtgaacgcactcaagagcaagctcaggcgaggaaacgagacctctttcgttccttctagaaggtctggaggacgtagagttattgaaaatgcagatggttctgaggaggaaacggacactcgagacgcagacttcaatggaaccaaggccagtgaa

SEQ ID NO: 253 - RNA, 207 nt, Homo sapiens
  misc_feature 1..207: note = Homo sapiens__P35749-1__SMMHC(1809-1877) CDS wt
  source 1..207: mol_type = mRNA
aagtccaagttcaagtccaccatcgcggcgctggaggccaagattgcacagctggaggagcaggtcgagcaggaggccagagagaaacaggcggccaccaagtcgctgaagcagaaagacaagaagctgaaggaaatcttgctgcaggtggaggacgagcgcaagatggccgagcagtacaaggagcaggcagagaaaggcaatgcc

SEQ ID NO: 254 - RNA, 69 nt, synthetic construct
  misc_feature 1..69: note = Artificial____Lifeact CDS wt
  source 1..69: mol_type = other RNA
ggcgtggccgacctgatcaagaagttcgagagcatcagcaaggaggagggggatccaccggtcgccacc

SEQ ID NO: 255 - RNA, 51 nt, Saccharomyces cerevisiae
  misc_feature 1..51: note = Saccharomyces cerevisiae S288C__NP_014882.4__Lifeact(1-17) CDS wt
  source 1..51: mol_type = mRNA
atgggcgtggccgacctgatcaagaagttcgagagcatctccaaggaggag

SEQ ID NO: 256 - RNA, 2481 nt, Homo sapiens
  misc_feature 1..2481: note = Homo sapiens__Q16665-1__HIF1alpha CDS wt
  source 1..2481: mol_type = mRNA
atggagggcgccggcggcgcgaacgacaagaaaaagataagttctgaacgtcgaaaagaaaagtctcgagatgcagccagatctcggcgaagtaaagaatctgaagttttttatgagcttgctcatcagttgccacttccacataatgtgagttcgcatcttgataaggcctctgtgatgaggcttaccatcagctatttgcgtgtgaggaaacttctggatgctggtgatttggatattgaagatgacatgaaagcacagatgaattgcttttatttgaaagccttggatggttttgttatggttctcacagatgatggtgacatgatttacatttctgataatgtgaacaaatacatgggattaactcagtttgaactaactggacacagtgtgtttgattttactcatccatgtgaccatgaggaaatgagagaaatgcttacacacagaaatggccttgtgaaaaagggtaaagaacaaaacacacagcgaagcttttttctcagaatgaagtgtaccctaactagccgaggaagaactatgaacataaagtctgcaacatggaaggtattgcactgcacaggccacattcacgtatatgataccaacagtaaccaacctcagtgtgggtataagaaaccacctatgacctgcttggtgctgatttgtgaacccattcctcacccatcaaatattgaaattcctttagatagcaagactttcctcagtcgacacagcctggatatgaaattttcttattgtgatgaaagaattaccgaattgatgggatatgagccagaagaacttttaggccgctcaatttatgaatattatcatgctttggactctgatcatctgaccaaaactcatcatgatatgtttactaaaggacaagtcaccacaggacagtacaggatgcttgccaaaagaggtggatatgtctgggttgaaactcaagcaactgtcatatataacaccaagaattctcaaccacagtgcattgtatgtgtgaattacgttgtgagtggtattattcagcacgacttgattttctcccttcaacaaacagaatgtgtccttaaaccggttgaatcttcagatatgaaaatgactcagctattcaccaaagttgaatcagaagatacaagtagcctctttgacaaacttaagaaggaacctgatgctttaactttgctggccccagccgctggagacacaatcatatctttagattttggcagcaacgacacagaaactgatgaccagcaacttgaggaagtaccattatataatgatgtaatgctcccctcacccaacgaaaaattacagaatataaatttggcaatgtctccattacccaccgctgaaacgccaaagccacttcgaagtagtgctgaccctgcactcaatcaagaagttgcattaaaattagaaccaaatccagagtcactggaactttcttttaccatgccccagattcaggatcagacacctagtccttccgatggaagcactagacaaagttcacctgagcctaatagtcccagtgaatattgtttttatgtggatagtgatatggtcaatgaattcaagttggaattggtagaaaaactttttgctgaagacacagaagcaaagaacccattttctactcaggacacagatttagacttggagatgttagctccctatatcccaatggatgatgacttccagttacgttccttcgatcagttgtcaccattagaaagcagttccgcaagccctgaaagcgcaagtcctcaaagcacagttacagtattccagcagactcaaatacaagaacctactgctaatgccaccactaccactgccaccactgatgaattaaaaacagtgacaaaagaccgtatggaagacattaaaatattgattgcatctccatctcctacccacatacataaagaaactactagtgccacatcatcaccatatagagatactcaaagtcggacagcctcaccaaacagagcaggaaaaggagtcatagaacagacagaaaaatctcatccaagaagccctaacgtgttatctgtcgctttgagtcaaagaactacagttcctgaggaagaactaaatccaaagatactagctttgcagaatgctcagagaaagcgaaaaatggaacatgatggttcactttttcaagcagtaggaattggaacattattacagcagccagacgatcatgcagctactacatcactttcttggaaacgtgtaaaaggatgcaaatctagtgaacagaatggaatggagcaaaagacaattattttaataccctctgatttagcatgtagactgctggggcaatcaatggatgaaagtggattaccacagctgaccagttatgattgtgaagttaatgctcctatacaaggcagcagaaacctactgcagggtgaagaattactcagagctttggatcaagttaactga

SEQ ID NO: 257 - RNA, 81 nt, Homo sapiens
  misc_feature 1..81: note = Homo sapiens__Q16665-1__HIF1alpha(549-575) CDS wt
  source 1..81: mol_type = mRNA
ccattttctactcaggacacagatttagacttggagatgttagctccctatatcccaatggatgatgacttccagttacgt

SEQ ID NO: 258 - RNA, 45 nt, synthetic construct
  misc_feature 1..45: note = Artificial____Linker CDS wt
  source 1..45: mol_type = other RNA
ggcgggagcggcgggtccggcgggagcggcggctccgggggcggg

SEQ ID NO: 259 - RNA, 1362 nt, Homo sapiens
  misc_feature 1..1362: note = Homo sapiens__Q01196-1__RUNX1(K83E_R174Q) CDS wt
  source 1..1362: mol_type = mRNA
atgcgtatccccgtagatgccagcacgagccgccgcttcacgccgccttccaccgcgctgagcccaggcaagatgagcgaggcgttgccgctgggcgccccggacgccggcgctgccctggccggcaagctgaggagcggcgaccgcagcatggtggaggtgctggccgaccacccgggcgagctggtgcgcaccgacagccccaacttcctctgctccgtgctgcctacgcactggcgctgcaacgagaccctgcccatcgctttcaaggtggtggccctaggggatgttccagatggcactctggtcactgtgatggctggcaatgatgaaaactactcggctgagctgagaaatgctaccgcagccatgaagaaccaggttgcaagatttaatgacctcaggtttgtcggtcgaagtggaagagggaaaagcttcactctgaccatcactgtcttcacaaacccaccgcaagtcgccacctaccacagagccatcaaaatcacagtggatgggccccaggaacctcgaagacatcggcagaaactagatgatcagaccaagcccgggagcttgtccttttccgagcggctcagtgaactggagcagctgcggcgcacagccatgagggtcagcccacaccacccagcccccacgcccaaccctcgtgcctccctgaaccactccactgcctttaaccctcagcctcagagtcagatgcaggatacaaggcagatccaaccatccccaccgtggtcctacgatcagtcctaccaatacctgggatccattgcctctccttctgtgcacccagcaacgcccatttcacctggacgtgccagcggcatgacaaccctctctgcagaactttccagtcgactctcaacggcacccgacctgacagcgttcagcgacccgcgccagttccccgcgctgccctccatctccgacccccgcatgcactatccaggcgccttcacctactccccgacgccggtcacctcgggcatcggcatcggcatgtcggccatgggctcggccacgcgctaccacacctacctgccgccgccctaccccggctcgtcgcaagcgcagggaggcccgttccaagccagctcgccctcctaccacctgtactacggcgcctcggccggctcctaccagttctccatggtgggcggcgagcgctcgccgccgcgcatcctgccgccctgcaccaacgcctccaccggctccgcgctgctcaaccccagcctcccgaaccagagcgacgtggtggaggccgagggcagccacagcaactcccccaccaacatggcgccctccgcgcgcctggaggaggccgtgtggaggccctactga

SEQ ID NO: 260 - RNA, 1362 nt, Homo sapiens
  misc_feature 1..1362: note = Homo sapiens__Q01196-1__RUNX1 CDS wt
  source 1..1362: mol_type = mRNA
atgcgtatccccgtagatgccagcacgagccgccgcttcacgccgccttccaccgcgctgagcccaggcaagatgagcgaggcgttgccgctgggcgccccggacgccggcgctgccctggccggcaagctgaggagcggcgaccgcagcatggtggaggtgctggccgaccacccgggcgagctggtgcgcaccgacagccccaacttcctctgctccgtgctgcctacgcactggcgctgcaacaagaccctgcccatcgctttcaaggtggtggccctaggggatgttccagatggcactctggtcactgtgatggctggcaatgatgaaaactactcggctgagctgagaaatgctaccgcagccatgaagaaccaggttgcaagatttaatgacctcaggtttgtcggtcgaagtggaagagggaaaagcttcactctgaccatcactgtcttcacaaacccaccgcaagtcgccacctaccacagagccatcaaaatcacagtggatgggccccgagaacctcgaagacatcggcagaaactagatgatcagaccaagcccgggagcttgtccttttccgagcggctcagtgaactggagcagctgcggcgcacagccatgagggtcagcccacaccacccagcccccacgcccaaccctcgtgcctccctgaaccactccactgcctttaaccctcagcctcagagtcagatgcaggatacaaggcagatccaaccatccccaccgtggtcctacgatcagtcctaccaatacctgggatccattgcctctccttctgtgcacccagcaacgcccatttcacctggacgtgccagcggcatgacaaccctctctgcagaactttccagtcgactctcaacggcacccgacctgacagcgttcagcgacccgcgccagttccccgcgctgccctccatctccgacccccgcatgcactatccaggcgccttcacctactccccgacgccggtcacctcgggcatcggcatcggcatgtcggccatgggctcggccacgcgctaccacacctacctgccgccgccctaccccggctcgtcgcaagcgcagggaggcccgttccaagccagctcgccctcctaccacctgtactacggcgcctcggccggctcctaccagttctccatggtgggcggcgagcgctcgccgccgcgcatcctgccgccctgcaccaacgcctccaccggctccgcgctgctcaaccccagcctcccgaaccagagcgacgtggtggaggccgagggcagccacagcaactcccccaccaacatggcgccctccgcgcgcctggaggaggccgtgtggaggccctactga

SEQ ID NO: 261 - RNA, 1443 nt, Homo sapiens
  misc_feature 1..1443: note = Homo sapiens__Q01196-8__RUNX1 CDS wt
  source 1..1443: mol_type = mRNA
atggcttcagacagcatatttgagtcatttccttcgtacccacagtgcttcatgagagaatgcatacttggaatgaatccttctagagacgtccacgatgccagcacgagccgccgcttcacgccgccttccaccgcgctgagcccaggcaagatgagcgaggcgttgccgctgggcgccccggacgccggcgctgccctggccggcaagctgaggagcggcgaccgcagcatggtggaggtgctggccgaccacccgggcgagctggtgcgcaccgacagccccaacttcctctgctccgtgctgcctacgcactggcgctgcaacaagaccctgcccatcgctttcaaggtggtggccctaggggatgttccagatggcactctggtcactgtgatggctggcaatgatgaaaactactcggctgagctgagaaatgctaccgcagccatgaagaaccaggttgcaagatttaatgacctcaggtttgtcggtcgaagtggaagagggaaaagcttcactctgaccatcactgtcttcacaaacccaccgcaagtcgccacctaccacagagccatcaaaatcacagtggatgggccccgagaacctcgaagacatcggcagaaactagatgatcagaccaagcccgggagcttgtccttttccgagcggctcagtgaactggagcagctgcggcgcacagccatgagggtcagcccacaccacccagcccccacgcccaaccctcgtgcctccctgaaccactccactgcctttaaccctcagcctcagagtcagatgcaggatacaaggcagatccaaccatccccaccgtggtcctacgatcagtcctaccaatacctgggatccattgcctctccttctgtgcacccagcaacgcccatttcacctggacgtgccagcggcatgacaaccctctctgcagaactttccagtcgactctcaacggcacccgacctgacagcgttcagcgacccgcgccagttccccgcgctgccctccatctccgacccccgcatgcactatccaggcgccttcacctactccccgacgccggtcacctcgggcatcggcatcggcatgtcggccatgggctcggccacgcgctaccacacctacctgccgccgccctaccccggctcgtcgcaagcgcagggaggcccgttccaagccagctcgccctcctaccacctgtactacggcgcctcggccggctcctaccagttctccatggtgggcggcgagcgctcgccgccgcgcatcctgccgccctgcaccaacgcctccaccggctccgcgctgctcaaccccagcctcccgaaccagagcgacgtggtggaggccgagggcagccacagcaactcccccaccaacatggcgccctccgcgcgcctggaggaggccgtgtggaggccctactga

SEQ ID NO: 262 - RNA, 1419 nt, Homo sapiens
  misc_feature 1..1419: note = Homo sapiens__Q01196-2__RUNX1 CDS wt
  source 1..1419: mol_type = mRNA
atgcgtatccccgtagatgccagcacgagccgccgcttcacgccgccttccaccgcgctgagcccaggcaagatgagcgaggcgttgccgctgggcgccccggacgccggcgctgccctggccggcaagctgaggagcggcgaccgcagcatggtggaggtgctggccgaccacccgggcgagctggtgcgcaccgacagccccaacttcctctgctccgtgctgcctacgcactggcgctgcaacaagaccctgcccatcgctttcaaggtggtggccctaggggatgttccagatggcactctggtcactgtgatggctggcaatgatgaaaactactcggctgagctgagaaatgctaccgcagccatgaagaaccaggttgcaagatttaatgacctcaggtttgtcggtcgaagtggaagagggaaaagcttcactctgaccatcactgtcttcacaaacccaccgcaagtcgccacctaccacagagccatcaaaatcacagtggatgggccccgagaacctcgaagacatcggcagaaactagatgatcagaccaagcccgggagcttgtccttttccgagcggctcagtgaactggagcagctgcggcgcacagccatgagggtcagcccacaccacccagcccccacgcccaaccctcgtgcctccctgaaccactccactgcctttaaccctcagcctcagagtcagatgcaggatacaaggcagatccaaccatccccaccgtggtcctacgatcagtcctaccaatacctgggatccattgcctctccttctgtgcacccagcaacgcccatttcacctggacgtgccagcggcatgacaaccctctctgcagaactttccagtcgactctcaacggcacccgacctgacagcgttcagcgacccgcgccagttccccgcgctgccctccatctccgacccccgcatgcactatccaggcgccttcacctactccccgacgccggtcacctcgggcatcggcatcggcatgtcggccatgggctcggccacgcgctaccacacctacctgccgccgccctaccccggttcgtcgcaagcgcagggaggcccgttccaagccagctcgccctcctaccacctgtactacggcgcctcggccggctcctaccagttctccatggtgggcggggagcgctcgccgccgcgcatcctgccgccctgcaccaacgcctccaccggctccgcgctgctcaaccccagcctcccgaaccagagcgacgtggtggaggccgagggcagccacagcaactcccccaccaacatggggggggcctcctgttcgcgacaagcccgccgggatcccgggccctgggcccggacaccgtcctggggccgagggcgcccgacggacaggatctcgctgtag

SEQ ID NO: 263 - RNA, 1419 nt, Homo sapiens
  misc_feature 1..1419: note = Homo sapiens__CAA56092.1__RUNX1 CDS wt
  source 1..1419: mol_type = mRNA
atgcgtatccccgtagatgccagcacgagccgccgcttcacgccgccttccaccgcgctgagcccaggcaagatgagcgaggcgttgccgctgggcgccccggacgccggcgctgccctggccggcaagctgaggagcggcgaccgcagcatggtggaggtgctggccgaccacccgggcgagctggtgcgcaccgacagccccaacttcctctgctccgtgctgcctacgcactggcgctgcaacaagaccctgcccatcgctttcaaggtggtggccctaggggatgttccagatggcactctggtcactgtgatggctggcaatgatgaaaactactcggctgagctgagaaatgctaccgcagccatgaagaaccaggttgcaagatttaatgacctcaggtttgtcggtcgaagtggaagagggaaaagcttcactctgaccatcactgtcttcacaaacccaccgcaagtcgccacctaccacagagccatcaaaatcacagtggatgggccccgagaacctcgaagacatcggcagaaactagatgatcagaccaagcccgggagcttgtccttttccgagcggctcagtgaactggagcagctgcggcgcacagccatgagggtcagcccacaccacccagcccccacgcccaaccctcgtgcctccctgaaccactccactgcctttaaccctcagcctcagagtcagatgcaggatacaaggcagatccaaccatccccaccgtggtcctacgatcagtcctaccaatacctgggatccattgcctctccttctgtgcacccagcaacgcccatttcacctggacgtgccagcggcatgacaaccctctctgcagaactttccagtcgactctcaacggcacccgacctgacagcgttcagcgacccgcgccagttccccgcgctgccctccatctccgacccccgcatgcactatccaggcgccttcacctactccccgacgccggtcacctcgggcatcggcatcggcatgtcggccatgggctcggccacgcgctaccacacctacctgccgccgccctaccccggttcgtcgcaagcgcagggaggcccgttccaagccagctcgccctcctaccacctgtactacggcgcctcggccggctcctaccagttctccatggtgggcggggagcgctcgccgccgcgcatcctgccgccctgcaccaacgcctccaccggctccgcgctgctcaaccccagcctcccgaaccagagcgacgtggtggaggccgagggcagacacagaaactcccccaccaacatggggggggcctcctgttcgcgacaagcccgccgggatcccgggccctgggcccggacaccgtcctggggccgagggcgcccgacggacaggatctcgctgtag

SEQ ID NO: 264 - RNA, 1407 nt, Homo sapiens
  misc_feature 1..1407: note = Homo sapiens__Q01196-10__RUNX1 CDS wt
  source 1..1407: mol_type = mRNA
atgcccgcagcaccgcggggaccggcgcagggggaagcggccgcccgcacgcgaagccgggatgccagcacgagccgccgcttcacgccgccttccaccgcgctgagcccaggcaagatgagcgaggcgttgccgctgggcgccccggacgccggcgctgccctggccggcaagctgaggagcggcgaccgcagcatggtggaggtgctggccgaccacccgggcgagctggtgcgcaccgacagccccaacttcctctgctccgtgctgcctacgcactggcgctgcaacaagaccctgcccatcgctttcaaggtggtggccctaggggatgttccagatggcactctggtcactgtgatggctggcaatgatgaaaactactcggctgagctgagaaatgctaccgcagccatgaagaaccaggttgcaagatttaatgacctcaggtttgtcggtcgaagtggaagagggaaaagcttcactctgaccatcactgtcttcacaaacccaccgcaagtcgccacctaccacagagccatcaaaatcacagtggatgggccccgagaacctcgaagacatcggcagaaactagatgatcagaccaagcccgggagcttgtccttttccgagcggctcagtgaactggagcagctgcggcgcacagccatgagggtcagcccacaccacccagcccccacgcccaaccctcgtgcctccctgaaccactccactgcctttaaccctcagcctcagagtcagatgcaggatacaaggcagatccaaccatccccaccgtggtcctacgatcagtcctaccaatacctgggatccattgcctctccttctgtgcacccagcaacgcccatttcacctggacgtgccagcggcatgacaaccctctctgcagaactttccagtcgactctcaacggcacccgacctgacagcgttcagcgacccgcgccagttccccgcgctgccctccatctccgacccccgcatgcactatccaggcgccttcacctactccccgacgccggtcacctcgggcatcggcatcggcatgtcggccatgggctcggccacgcgctaccacacctacctgccgccgccctaccccggctcgtcgcaagcgcagggaggcccgttccaagccagctcgccctcctaccacctgtactacggcgcctcggccggctcctaccagttctccatggtgggcggcgagcgctcgccgccgcgcatcctgccgccctgcaccaacgcctccaccggctccgcgctgctcaaccccagcctcccgaaccagagcgacgtggtggaggccgagggcagccacagcaactcccccaccaacatggcgccctccgcgcgcctggaggaggccgtgtggaggccctactga

SEQ ID NO: 265 - RNA, 1371 nt, Homo sapiens
  misc_feature 1..1371: note = Homo sapiens__Q01196-9__RUNX1 CDS wt
  source 1..1371: mol_type = mRNA
atgaatccttctagagacgtccacgatgccagcacgagccgccgcttcacgccgccttccaccgcgctgagcccaggcaagatgagcgaggcgttgccgctgggcgccccggacgccggcgctgccctggccggcaagctgaggagcggcgaccgcagcatggtggaggtgctggccgaccacccgggcgagctggtgcgcaccgacagccccaacttcctctgctccgtgctgcctacgcactggcgctgcaacaagaccctgcccatcgctttcaaggtggtggccctaggggatgttccagatggcactctggtcactgtgatggctggcaatgatgaaaactactcggctgagctgagaaatgctaccgcagccatgaagaaccaggttgcaagatttaatgacctcaggtttgtcggtcgaagtggaagagggaaaagcttcactctgaccatcactgtcttcacaaacccaccgcaagtcgccacctaccacagagccatcaaaatcacagtggatgggccccgagaacctcgaagacatcggcagaaactagatgatcagaccaagcccgggagcttgtccttttccgagcggctcagtgaactggagcagctgcggcgcacagccatgagggtcagcccacaccacccagcccccacgcccaaccctcgtgcctccctgaaccactccactgcctttaaccctcagcctcagagtcagatgcaggatacaaggcagatccaaccatccccaccgtggtcctacgatcagtcctaccaatacctgggatccattgcctctccttctgtgcacccagcaacgcccatttcacctggacgtgccagcggcatgacaaccctctctgcagaactttccagtcgactctcaacggcacccgacctgacagcgttcagcgacccgcgccagttccccgcgctgccctccatctccgacccccgcatgcactatccaggcgccttcacctactccccgacgccggtcacctcgggcatcggcatcggcatgtcggccatgggctcggccacgcgctaccacacctacctgccgccgccctaccccggctcgtcgcaagcgcagggaggcccgttccaagccagctcgccctcctaccacctgtactacggcgcctcggccggctcctaccagttctccatggtgggcggcgagcgctcgccgccgcgcatcctgccgccctgcaccaacgcctccaccggctccgcgctgctcaaccccagcctcccgaaccagagcgacgtggtggaggccgagggcagccacagcaactcccccaccaacatggcgccctccgcgcgcctggaggaggccgtgtggaggccctactga

SEQ ID NO: 266 - RNA, 1362 nt, Homo sapiens
  misc_feature 1..1362: note = Homo sapiens__AAA51720.1__RUNX1 CDS wt
  source 1..1362: mol_type = mRNA
atgcgtatccccgtagatgccagcacgagccgccgcttcacgccgccttccaccgcgctgagcccaggcaagatgagcgaggcgttgccgctgggcgccccggacgccggcgctgccctggccggcaagctgaggagcggcgaccgcagcatggtggaggtgctggccgaccacccgggcgagctggtgcgcaccgacagccccaacttcctctgctccgtgctgcctacgcactggcgctgcaacaagaccctgcccatcgctttcaaggtggtggccctaggggatgttccagatggcactctggtcactgtgatggctggcaatgatgaaaactactcggctgagctgagaaatgctaccgcagccatgaagaaccaggttgcaagatttaatgacctcaggtttgtcggtcgaagtggaagagggaaaagcttcactctgaccatcactgtcttcacaaacccaccgcaagtcgccacctaccacagagccatcaaaatcacagtggatgggccccgagaacctcgaagacatcggcagaaactagatgatcagaccaagcccgggagcttgtccttttccgagcggctcagtgaactggagcagctgcggcgcacagccatgagggtcagcccacaccacccagcccccacgcccaaccctcgtgcctccctgaaccactccactgcctttaaccctcagcctcagagtcagatgcaggatacaaggcagatccaaccatccccaccgtggtcctacgatcagtcctaccaatacctgggatccattgcctctccttctgtgcacccagcaacgcccatttcacctggacgtgccagcggcatgacaaccctctctgcagaactttccagtcgactctcaacggcacccgacctgacagcgttcagcgacccgcgccagttccccgcgctgccctccatctccgacccccgcatgcactatccaggcgccttcacctactccccgacgccggtcacctcgggcatcggcatcggcatgtcggccatgggctcggccacgcgctaccacacctacctgccgccgccctaccccggctcgtcgcaagcgcagggaggcccgttccaagccagctcgccctcctaccacctgtactacggcgcctcggccggctcctaccagttctccatggtgggcggcgagcgctcgccgccgcgcatcctgccgccctgcaccaacgcctccaccggcttcgcgctgctcaaccccagcctcccgaaccagagcgacgtggtggaggccgagggcagccacagcaactcccccaccaacatggccccctccgcgcgcctggaggaggccgtgtggaggccctactga

SEQ ID NO: 267 - RNA, 1170 nt, Homo sapiens
  misc_feature 1..1170: note = Homo sapiens__H9KVB1__RUNX1 CDS wt
  source 1..1170: mol_type = mRNA
atgcgtatccccgtagatgccagcacgagccgccgcttcacgccgccttccaccgcgctgagcccaggcaagatgagcgaggcgttgccgctgggcgccccggacgccggcgctgccctggccggcaagctgaggagcggcgaccgcagcatggtggaggtgctggccgaccacccgggcgagctggtgcgcaccgacagccccaacttcctctgctccgtgctgcctacgcactggcgctgcaacaagaccctgcccatcgctttcaaggtggtggccctaggggatgttccagatggcactctggtcactgtgatggctggcaatgatgaaaactactcggctgagctgagaaatgctaccgcagccatgaagaaccaggttgcaagatttaatgacctcaggtttgtcggtcgaagtggaagagggaaaagcttcactctgaccatcactgtcttcacaaacccaccgcaagtcgccacctaccacagagccatcaaaatcacagtggatgggccccgagaacctcgaaatacaaggcagatccaaccatccccaccgtggtcctacgatcagtcctaccaatacctgggatccattgcctctccttctgtgcacccagcaacgcccatttcacctggacgtgccagcggcatgacaaccctctctgcagaactttccagtcgactctcaacggcacccgacctgacagcgttcagcgacccgcgccagttccccgcgctgccctccatctccgacccccgcatgcactatccaggcgccttcacctactccccgacgccggtcacctcgggcatcggcatcggcatgtcggccatgggctcggccacgcgctaccacacctacctgccgccgccctaccccggctcgtcgcaagcgcagggaggcccgttccaagccagctcgccctcctaccacctgtactacggcgcctcggccggctcctaccagttctccatggtgggcggcgagcgctcgccgccgcgcatcctgccgccctgcaccaacgcctccaccggctccgcgctgctcaaccccagcctcccgaaccagagcgacgtggtggaggccgagggcagccacagcaactcccccaccaacatggcgccctccgcgcgcctggaggaggccgtgtggaggccctactga

SEQ ID NO: 268 - RNA, 1047 nt, Homo sapiens
  misc_feature 1..1047: note = Homo sapiens__Q01196-11__RUNX1 CDS wt
  source 1..1047: mol_type = mRNA
atggctggcaatgatgaaaactactcggctgagctgagaaatgctaccgcagccatgaagaaccaggttgcaagatttaatgacctcaggtttgtcggtcgaagtggaagagggaaaagcttcactctgaccatcactgtcttcacaaacccaccgcaagtcgccacctaccacagagccatcaaaatcacagtggatgggccccgagaacctcgaagacatcggcagaaactagatgatcagaccaagcccgggagcttgtccttttccgagcggctcagtgaactggagcagctgcggcgcacagccatgagggtcagcccacaccacccagcccccacgcccaaccctcgtgcctccctgaaccactccactgcctttaaccctcagcctcagagtcagatgcaggatacaaggcagatccaaccatccccaccgtggtcctacgatcagtcctaccaatacctgggatccattgcctctccttctgtgcacccagcaacgcccatttcacctggacgtgccagcggcatgacaaccctctctgcagaactttccagtcgactctcaacggcacccgacctgacagcgttcagcgacccgcgccagttccccgcgctgccctccatctccgacccccgcatgcactatccaggcgccttcacctactccccgacgccggtcacctcgggcatcggcatcggcatgtcggccatgggctcggccacgcgctaccacacctacctgccgccgccctaccccggctcgtcgcaagcgcagggaggcccgttccaagccagctcgccctcctaccacctgtactacggcgcctcggccggctcctaccagttctccatggtgggcggcgagcgctcgccgccgcgcatcctgccgccctgcaccaacgcctccaccggctccgcgctgctcaaccccagcctcccgaaccagagcgacgtggtggaggccgagggcagccacagcaactcccccaccaacatggccccctccgcgcgcctggaggaggccgtgtggaggccctactga

SEQ ID NO: 269 - RNA, 774 nt, Homo sapiens
  misc_feature 1..774: note = Homo sapiens__Q01196-4__RUNX1 CDS wt
  source 1..774: mol_type = mRNA
atgcgtatccccgtagatgccagcacgagccgccgcttcacgccgccttccaccgcgctgagcccaggcaagatgagcgaggcgttgccgctgggcgccccggacgccggcgctgccctggccggcaagctgaggagcggcgaccgcagcatggtggaggtgctggccgaccacccgggcgagctggtgcgcaccgacagccccaacttcctctgctccgtgctgcctacgcactggcgctgcaacaagaccctgcccatcgctttcaaggtggtggccctaggggatgttccagatggcactctggtcactgtgatggctggcaatgatgaaaactactcggctgagctgagaaatgctaccgcagccatgaagaaccaggttgcaagatttaatgacctcaggtttgtcggtcgaagtggaagagggaaaagcttcactctgaccatcactgtcttcacaaacccaccgcaagtcgccacctaccacagagccatcaaaatcacagtggatgggccccgagaacctcgaagacatcggcagaaactagatgatcagaccaagcccgggagcttgtccttttccgagcggctcagtgaactggagcagctgcggcgcacagccatgagggtcagcccacaccacccagcccccacgcccaaccctcgtgcctccctgaaccactccactgcctttaaccctcagcctcagagtcagatgcaggatacaaggcagatccaaccatccccaccgtggtcctacgatcagtcctga

SEQ ID NO: 270 - RNA, 771 nt, Homo sapiens
  misc_feature 1..771: note = Homo sapiens__A8MZI9__RUNX1 CDS wt
  source 1..771: mol_type = mRNA
atgcccgcagcaccgcggggaccggcgcagggggaagcggccgcccgcacgcgaagccgggatgccagcacgagccgccgcttcacgccgccttccaccgcgctgagcccaggcaagatgagcgaggcgttgccgctgggcgccccggacgccggcgctgccctggccggcaagctgaggagcggcgaccgcagcatggtggaggtgctggccgaccacccgggcgagctggtgcgcaccgacagccccaacttcctctgctccgtgctgcctacgcactggcgctgcaacaagaccctgcccatcgctttcaaggtggtggccctaggggatgttccagatggcactctggtcactgtgatggctggcaatgatgaaaactactcggctgagctgagaaatgctaccgcagccatgaagaaccaggttgcaagatttaatgacctcaggtttgtcggtcgaagtggaagagggaaaagcttcactctgaccatcactgtcttcacaaacccaccgcaagtcgccacctaccacagagccatcaaaatcacagtggatgggccccgagaacctcgaagacatcggcagaaactagatgatcagaccaagcccgggagcttgtccttttccgagcggctcagtgaactggagcagctgcggcgcacagccatgagggtcagcccacaccacccagcccccacgcccaaccctcgtgcctccctgaaccactccactgcctttaaccctcagcctcagagtcagatgcagtga

SEQ ID NO: 271 - RNA, 753 nt, Homo sapiens
  misc_feature 1..753: note = Homo sapiens__Q01196-3__RUNX1 CDS wt
  source 1..753: mol_type = mRNA
atgcgtatccccgtagatgccagcacgagccgccgcttcacgccgccttccaccgcgctgagcccaggcaagatgagcgaggcgttgccgctgggcgccccggacgccggcgctgccctggccggcaagctgaggagcggcgaccgcagcatggtggaggtgctggccgaccacccgggcgagctggtgcgcaccgacagccccaacttcctctgctccgtgctgcctacgcactggcgctgcaacaagaccctgcccatcgctttcaaggtggtggccctaggggatgttccagatggcactctggtcactgtgatggctggcaatgatgaaaactactcggctgagctgagaaatgctaccgcagccatgaagaaccaggttgcaagatttaatgacctcaggtttgtcggtcgaagtggaagagggaaaagcttcactctgaccatcactgtcttcacaaacccaccgcaagtcgccacctaccacagagccatcaaaatcacagtggatgggccccgagaacctcgaagacatcggcagaaactagatgatcagaccaagcccgggagcttgtccttttccgagcggctcagtgaactggagcagctgcggcgcacagccatgagggtcagcccacaccacccagcccccacgcccaaccctcgtgcctccctgaaccactccactgcctttaaccctcagcctcagagtcagatgcaggaggaagacacagcaccctggagatgttaa

SEQ ID NO: 272 - RNA, 729 nt, Homo sapiens
  misc_feature 1..729: note = Homo sapiens__Q01196-7__RUNX1 CDS wt
  source 1..729: mol_type = mRNA
atgcgtatccccgtagatgccagcacgagccgccgcttcacgccgccttccaccgcgctgagcccaggcaagatgagcgaggcgttgccgctgggcgccccggacgccggcgctgccctggccggcaagctgaggagcggcgaccgcagcatggtggaggtgctggccgaccacccgggcgagctggtgcgcaccgacagccccaacttcctctgctccgtgctgcctacgcactggcgctgcaacaagaccctgcccatcgctttcaaggtggtggccctaggggatgttccagatggcactctggtcactgtgatggctggcaatgatgaaaactactcggctgagctgagaaatgctaccgcagccatgaagaaccaggttgcaagatttaatgacctcaggtttgtggatgggccccgagaacctcgaagacatcggcagaaactagatgatcagaccaagcccgggagcttgtccttttccgagcggctcagtgaactggagcagctgcggcgcacagccatgagggtcagcccacaccacccagcccccacgcccaaccctcgtgcctccctgaaccactccactgcctttaaccctcagcctcagagtcagatgcaggatacaaggcagatccaaccatccccaccgtggtcctacgatcagtcctaccaatacctgggatccattgcctctccttctgtgcacccagcaacgcccatttga

SEQ ID NO: 273 - RNA, 675 nt, Homo sapiens
  misc_feature 1..675: note = Homo sapiens__Q01196-5__RUNX1 CDS wt
  source 1..675: mol_type = mRNA
atgcgtatccccgtagatgccagcacgagccgccgcttcacgccgccttccaccgcgctgagcccaggcaagatgagcgaggcgttgccgctgggcgccccggacgccggcgctgccctggccggcaagctgaggagcggcgaccgcagcatggtggaggtgctggccgaccacccgggcgagctggtgcgcaccgacagccccaacttcctctgctccgtgctgcctacgcactggcgctgcaacaagaccctgcccatcgctttcaaggtggtggccctaggggatgttccagatggcactctggtcactgtgatggctggcaatgatgaaaactactcggctgagctgagaaatgctaccgcagccatgaagaaccaggttgcaagatttaatgacctcaggtttgtcggtcgaagtggaagagggaaaagcttcactctgaccatcactgtcttcacaaacccaccgcaagtcgccacctaccacagagccatcaaaatcacagtggatgggccccgagaacctcgaagtaagtgcatccacttggggctggtacaccctccaggctggtacaccctccaggctggtatactcagggaccatgtctcagattccttgggttcaacctttcccccagggggatggcaggcccccgtaaagccaaaaagttga

SEQ ID NO: 274 - RNA, 567 nt, Homo sapiens
  misc_feature 1..567: note = Homo sapiens__Q01196-6__RUNX1 CDS wt
  source 1..567: mol_type = mRNA
atgcgtatccccgtagatgccagcacgagccgccgcttcacgccgccttccaccgcgctgagcccaggcaagatgagcgaggcgttgccgctgggcgccccggacgccggcgctgccctggccggcaagctgaggagcggcgaccgcagcatggtggaggtgctggccgaccacccgggcgagctggtgcgcaccgacagccccaacttcctctgctccgtgctgcctacgcactggcgctgcaacaagaccctgcccatcgctttcaaggtggtggccctaggggatgttccagatggcactctggtcactgtgatggctggcaatgatgaaaactactcggctgagctgagaaatgctaccgcagccatgaagaaccaggttgcaagatttaatgacctcaggtttgtcggtcgaagtggaagagggaaaagcttcactctgaccatcactgtcttcacaaacccaccgcaagtcgccacctaccacagagccatcaaaatcacagtggatgggccccgagaacctcgaaactctttgacctggcctcggtatcctcacatttga

SEQ ID NO: 275 - RNA, 384 nt, Homo sapiens
  misc_feature 1..384: note = Homo sapiens__Q01196-1__RUNX1(1-128) CDS wt
  source 1..384: mol_type = mRNA
atgcgtatccccgtagatgccagcacgagccgccgcttcacgccgccttccaccgcgctgagcccaggcaagatgagcgaggcgttgccgctgggcgccccggacgccggcgctgccctggccggcaagctgaggagcggcgaccgcagcatggtggaggtgctggccgaccacccgggcgagctggtgcgcaccgacagccccaacttcctctgctccgtgctgcctacgcactggcgctgcaacaagaccctgcccatcgctttcaaggtggtggccctaggggatgttccagatggcactctggtcactgtgatggctggcaatgatgaaaactactcggctgagctgagaaatgctaccgcagccatgaagaaccaggtt

SEQ ID NO: 276 - RNA, 531 nt, Homo sapiens
  misc_feature 1..531: note = Homo sapiens__Q01196-1__RUNX1(1-177) CDS wt
  source 1..531: mol_type = mRNA
atgcgtatccccgtagatgccagcacgagccgccgcttcacgccgccttccaccgcgctgagcccaggcaagatgagcgaggcgttgccgctgggcgccccggacgccggcgctgccctggccggcaagctgaggagcggcgaccgcagcatggtggaggtgctggccgaccacccgggcgagctggtgcgcaccgacagccccaacttcctctgctccgtgctgcctacgcactggcgctgcaacaagaccctgcccatcgctttcaaggtggtggccctaggggatgttccagatggcactctggtcactgtgatggctggcaatgatgaaaactactcggctgagctgagaaatgctaccgcagccatgaagaaccaggttgcaagatttaatgacctcaggtttgtcggtcgaagtggaagagggaaaagcttcactctgaccatcactgtcttcacaaacccaccgcaagtcgccacctaccacagagccatcaaaatcacagtggatgggccccgagaacctcga

SEQ ID NO: 277 - RNA, 723 nt, Homo sapiens
  misc_feature 1..723: note = Homo sapiens__Q01196-1__RUNX1(1-241) CDS wt
  source 1..723: mol_type = mRNA
atgcgtatccccgtagatgccagcacgagccgccgcttcacgccgccttccaccgcgctgagcccaggcaagatgagcgaggcgttgccgctgggcgccccggacgccggcgctgccctggccggcaagctgaggagcggcgaccgcagcatggtggaggtgctggccgaccacccgggcgagctggtgcgcaccgacagccccaacttcctctgctccgtgctgcctacgcactggcgctgcaacaagaccctgcccatcgctttcaaggtggtggccctaggggatgttccagatggcactctggtcactgtgatggctggcaatgatgaaaactactcggctgagctgagaaatgctaccgcagccatgaagaaccaggttgcaagatttaatgacctcaggtttgtcggtcgaagtggaagagggaaaagcttcactctgaccatcactgtcttcacaaacccaccgcaagtcgccacctaccacagagccatcaaaatcacagtggatgggccccgagaacctcgaagacatcggcagaaactagatgatcagaccaagcccgggagcttgtccttttccgagcggctcagtgaactggagcagctgcggcgcacagccatgagggtcagcccacaccacccagcccccacgcccaaccctcgtgcctccctgaaccactccactgcctttaaccctcagcctcagagtcagatgcag

SEQ ID NO: 278 - RNA, 1815 nt, Homo sapiens
  misc_feature 1..1815: note = Homo sapiens__Q06455-1__RUNX1T1a CDS wt
  source 1..1815: mol_type = mRNA
atgatatctgtcaaaagaaacacttggagagcactgagtttagtaataggtgactgccggaaaaaagggaactttgaatattgtcaagatcgtactgagaagcactccacaatgccagactcacctgtggatgtgaagacgcaatctaggctgactcctccaacaatgccacctcccccaactactcaaggagctccaagaaccagttcatttacaccgacaacgttaactaatggcacgagccattctcctacagccttgaatggcgccccctcaccacccaatggcttcagcaatgggccttcctcttcttcctcctcctctctggctaatcaacagctgcccccagcctgtggtgccaggcaactcagcaagctgaaaaggttccttactaccctgcagcagtttggcaatgacatttcacccgagataggagaaagagttcgcaccctcgttctgggactagtgaactccactttgacaattgaagaatttcattccaaactgcaagaagctactaacttcccactgagaccttttgtcatcccatttttgaaggccaacttgcccctgctgcagcgtgagctcctccactgcgcaagactggccaaacagaaccctgcccagtacctcgcccagcatgaacagctgcttctggatgccagcaccacctcacctgttgactcctcagagctgcttctcgatgtgaacgaaaacgggaagaggcgaactccagacagaaccaaagaaaatggctttgacagagagcctttgcactcagaacatccaagcaagcgaccatgcactattagcccaggccagcggtacagtccaaataacggcttatcctaccagcccaatggcctgcctcaccctaccccacctccacctcagcattaccgtttggatgatatggccattgcccaccactacagggactcctatcgacaccccagccacagggacctcagggacagaaacagacctatggggttgcatggcacacgtcaagaagaaatgattgatcacagactaacagacagagaatgggcagaagagtggaaacatcttgaccatctgttaaactgcataatggacatggtagaaaaaacaaggcgatctctcaccgtactaaggcggtgtcaagaagcagaccgggaagaattgaattactggatccggcggtacagtgacgccgaggacttaaaaaaaggtggcggcagtagcagcagccactctaggcagcagagtcccgtcaacccagacccagttgcactagacgcgcatcgggaattccttcacaggcctgcgtctggatacgtgccagaggagatctggaagaaagctgaggaggccgtcaatgaggtgaagcgccaggcgatgacggagctgcagaaggccgtgtctgaggcggagcggaaagcccacgacatgatcacaacagagagggccaagatggagcgcacggtcgccgaggccaaacggcaggcggcggaggacgcactggcagttatcaatcagcaggaggattcaagcgagagttgctggaattgtggccgtaaagcgagtgaaacctgcagtggctgtaacacagcccgatactgtggctcattttgccagcacaaagactgggagaagcaccatcacatctgtggacagaccctgcaggcccagcagcagggagacacacctgcagtcagctcctctgtcacgcccaacagcggggctgggagcccgatggacacaccaccagcagccactccgaggtcaaccaccccgggaaccccttccaccatagagacaacccctcgctag

SEQ ID NO: 279 - RNA, 1992 nt, Homo sapiens
  misc_feature 1..1992: note = Homo sapiens__A0A0A0MSU1__RUNX1T1a CDS wt
  source 1..1992: mol_type = mRNA
atgtgccatcctgacaaggcttttacttctgataagctccaatgtgtgtttaatgaatacaaagccgcggtctgggtgccgcctcggccgcggccgctctcccgcgctcctttgccagaagctggcggagagaatttacatttaaagattagcagagtgagaaagagaaatctgccttttgttgtgtggggtgaggaggaggcatctacccctggccttgacgctatctcccatcacctctgctatccagacaggactcaccgagatcgtactgagaagcactccacaatgccagactcacctgtggatgtgaagacgcaatctaggctgactcctccaacaatgccacctcccccaactactcaaggagctccaagaaccagttcatttacaccgacaacgttaactaatggcacgagccattctcctacagccttgaatggcgccccctcaccacccaatggcttcagcaatgggccttcctcttcttcctcctcctctctggctaatcaacagctgcccccagcctgtggtgccaggcaactcagcaagctgaaaaggttccttactaccctgcagcagtttggcaatgacatttcacccgagataggagaaagagttcgcaccctcgttctgggactagtgaactccactttgacaattgaagaatttcattccaaactgcaagaagctactaacttcccactgagaccttttgtcatcccatttttgaaggccaacttgcccctgctgcagcgtgagctcctccactgcgcaagactggccaaacagaaccctgcccagtacctcgcccagcatgaacagctgcttctggatgccagcaccacctcacctgttgactcctcagagctgcttctcgatgtgaacgaaaacgggaagaggcgaactccagacagaaccaaagaaaatggctttgacagagagcctttgcactcagaacatccaagcaagcgaccatgcactattagcccaggccagcggtacagtccaaataacggcttatcctaccagcccaatggcctgcctcaccctaccccacctccacctcagcattaccgtttggatgatatggccattgcccaccactacagggactcctatcgacaccccagccacagggacctcagggacagaaacagacctatggggttgcatggcacacgtcaagaagaaatgattgatcacagactaacagacagagaatgggcagaagagtggaaacatcttgaccatctgttaaactgcataatggacatggtagaaaaaacaaggcgatctctcaccgtactaaggcggtgtcaagaagcagaccgggaagaattgaattactggatccggcggtacagtgacgccgaggacttaaaaaaaggtggcggcagtagcagcagccactctaggcagcagagtcccgtcaacccagacccagttgcactagacgcgcatcgggaattccttcacaggcctgcgtctggatacgtgccagaggagatctggaagaaagctgaggaggccgtcaatgaggtgaagcgccaggcgatgacggagctgcagaaggccgtgtctgaggcggagcggaaagcccacgacatgatcacaacagagagggccaagatggagcgcacggtcgccgaggccaaacggcaggcggcggaggacgcactggcagttatcaatcagcaggaggattcaagcgagagttgctggaattgtggccgtaaagcgagtgaaacctgcagtggctgtaacacagcccgatactgtggctcattttgccagcacaaagactgggagaagcaccatcacatctgtggacagaccctgcaggcccagcagcagggagacacacctgcagtcagctcctctgtcacgcccaacagcggggctgggagcccgatggacacaccaccagcagccactccgaggtcaaccaccccgggaaccccttccaccatagagacaacccctcgctag

SEQ ID NO: 280 - RNA, 1848 nt, Homo sapiens
  misc_feature 1..1848: note = Homo sapiens__Q06455-3__RUNX1T1a CDS wt
  source 1..1848: mol_type = mRNA
atgtgccatcctgacaaggcttttacttctgataagctccaatgtgtgtttaatgaatacaaagccgcggtctgggtgccgcctcggccgcggccgctctcccgcgctcctttgccagaagatcgtactgagaagcactccacaatgccagactcacctgtggatgtgaagacgcaatctaggctgactcctccaacaatgccacctcccccaactactcaaggagctccaagaaccagttcatttacaccgacaacgttaactaatggcacgagccattctcctacagccttgaatggcgccccctcaccacccaatggcttcagcaatgggccttcctcttcttcctcctcctctctggctaatcaacagctgcccccagcctgtggtgccaggcaactcagcaagctgaaaaggttccttactaccctgcagcagtttggcaatgacatttcacccgagataggagaaagagttcgcaccctcgttctgggactagtgaactccactttgacaattgaagaatttcattccaaactgcaagaagctactaacttcccactgagaccttttgtcatcccatttttgaaggccaacttgcccctgctgcagcgtgagctcctccactgcgcaagactggccaaacagaaccctgcccagtacctcgcccagcatgaacagctgcttctggatgccagcaccacctcacctgttgactcctcagagctgcttctcgatgtgaacgaaaacgggaagaggcgaactccagacagaaccaaagaaaatggctttgacagagagcctttgcactcagaacatccaagcaagcgaccatgcactattagcccaggccagcggtacagtccaaataacggcttatcctaccagcccaatggcctgcctcaccctaccccacctccacctcagcattaccgtttggatgatatggccattgcccaccactacagggactcctatcgacaccccagccacagggacctcagggacagaaacagacctatggggttgcatggcacacgtcaagaagaaatgattgatcacagactaacagacagagaatgggcagaagagtggaaacatcttgaccatctgttaaactgcataatggacatggtagaaaaaacaaggcgatctctcaccgtactaaggcggtgtcaagaagcagaccgggaagaattgaattactggatccggcggtacagtgacgccgaggacttaaaaaaaggtggcggcagtagcagcagccactctaggcagcagagtcccgtcaacccagacccagttgcactagacgcgcatcgggaattccttcacaggcctgcgtctggatacgtgccagaggagatctggaagaaagctgaggaggccgtcaatgaggtgaagcgccaggcgatgacggagctgcagaaggccgtgtctgaggcggagcggaaagcccacgacatgatcacaacagagagggccaagatggagcgcacggtcgccgaggccaaacggcaggcggcggaggacgcactggcagttatcaatcagcaggaggattcaagcgagagttgctggaattgtggccgtaaagcgagtgaaacctgcagtggctgtaacacagcccgatactgtggctcattttgccagcacaaagactgggagaagcaccatcacatctgtggacagaccctgcaggcccagcagcagggagacacacctgcagtcagctcctctgtcacgcccaacagcggggctgggagcccgatggacacaccaccagcagccactccgaggtcaaccaccccgggaaccccttccaccatagagacaacccctcgctag

SEQ ID NO: 281 - RNA, 1755 nt, Homo sapiens
  misc_feature 1..1755: note = Homo sapiens__A0A087WWT6__RUNX1T1a CDS wt
  source 1..1755: mol_type = mRNA
atggtgggactctccggccctgtgcagtatcgtactgagaagcactccacaatgccagactcacctgtggatgtgaagacgcaatctaggctgactcctccaacaatgccacctcccccaactactcaaggagctccaagaaccagttcatttacaccgacaacgttaactaatggcacgagccattctcctacagccttgaatggcgccccctcaccacccaatggcttcagcaatgggccttcctcttcttcctcctcctctctggctaatcaacagctgcccccagcctgtggtgccaggcaactcagcaagctgaaaaggttccttactaccctgcagcagtttggcaatgacatttcacccgagataggagaaagagttcgcaccctcgttctgggactagtgaactccactttgacaattgaagaatttcattccaaactgcaagaagctactaacttcccactgagaccttttgtcatcccatttttgaaggccaacttgcccctgctgcagcgtgagctcctccactgcgcaagactggccaaacagaaccctgcccagtacctcgcccagcatgaacagctgcttctggatgccagcaccacctcacctgttgactcctcagagctgcttctcgatgtgaacgaaaacgggaagaggcgaactccagacagaaccaaagaaaatggctttgacagagagcctttgcactcagaacatccaagcaagcgaccatgcactattagcccaggccagcggtacagtccaaataacggcttatcctaccagcccaatggcctgcctcaccctaccccacctccacctcagcattaccgtttggatgatatggccattgcccaccactacagggactcctatcgacaccccagccacagggacctcagggacagaaacagacctatggggttgcatggcacacgtcaagaagaaatgattgatcacagactaacagacagagaatgggcagaagagtggaaacatcttgaccatctgttaaactgcataatggacatggtagaaaaaacaaggcgatctctcaccgtactaaggcggtgtcaagaagcagaccgggaagaattgaattactggatccggcggtacagtgacgccgaggacttaaaaaaaggtggcggcagtagcagcagccactctaggcagcagagtcccgtcaacccagacccagttgcactagacgcgcatcgggaattccttcacaggcctgcgtctggatacgtgccagaggagatctggaagaaagctgaggaggccgtcaatgaggtgaagcgccaggcgatgacggagctgcagaaggccgtgtctgaggcggagcggaaagcccacgacatgatcacaacagagagggccaagatggagcgcacggtcgccgaggccaaacggcaggcggcggaggacgcactggcagttatcaatcagcaggaggattcaagcgagagttgctggaattgtggccgtaaagcgagtgaaacctgcagtggctgtaacacagcccgatactgtggctcattttgccagcacaaagactgggagaagcaccatcacatctgtggacagaccctgcaggcccagcagcagggagacacacctgcagtcagctcctctgtcacgcccaacagcggggctgggagcccgatggacacaccaccagcagccactccgaggtcaaccaccccgggaaccccttccaccatagagacaacccctcgctag

SEQ ID NO: 282 - RNA, 1734 nt, Homo sapiens
  misc_feature 1..1734: note = Homo sapiens__Q06455-2__RUNX1T1a CDS wt
  source 1..1734: mol_type = mRNA
atgcctgatcgtactgagaagcactccacaatgccagactcacctgtggatgtgaagacgcaatctaggctgactcctccaacaatgccacctcccccaactactcaaggagctccaagaaccagttcatttacaccgacaacgttaactaatggcacgagccattctcctacagccttgaatggcgccccctcaccacccaatggcttcagcaatgggccttcctcttcttcctcctcctctctggctaatcaacagctgcccccagcctgtggtgccaggcaactcagcaagctgaaaaggttccttactaccctgcagcagtttggcaatgacatttcacccgagataggagaaagagttcgcaccctcgttctgggactagtgaactccactttgacaattgaagaatttcattccaaactgcaagaagctactaacttcccactgagaccttttgtcatcccatttttgaaggccaacttgcccctgctgcagcgtgagctcctccactgcgcaagactggccaaacagaaccctgcccagtacctcgcccagcatgaacagctgcttctggatgccagcaccacctcacctgttgactcctcagagctgcttctcgatgtgaacgaaaacgggaagaggcgaactccagacagaaccaaagaaaatggctttgacagagagcctttgcactcagaacatccaagcaagcgaccatgcactattagcccaggccagcggtacagtccaaataacggcttatcctaccagcccaatggcctgcctcaccctaccccacctccacctcagcattaccgtttggatgatatggccattgcccaccactacagggactcctatcgacaccccagccacagggacctcagggacagaaacagacctatggggttgcatggcacacgtcaagaagaaatgattgatcacagactaacagacagagaatgggcagaagagtggaaacatcttgaccatctgttaaactgcataatggacatggtagaaaaaacaaggcgatctctcaccgtactaaggcggtgtcaagaagcagaccgggaagaattgaattactggatccggcggtacagtgacgccgaggacttaaaaaaaggtggcggcagtagcagcagccactctaggcagcagagtcccgtcaacccagacccagttgcactagacgcgcatcgggaattccttcacaggcctgcgtctggatacgtgccagaggagatctggaagaaagctgaggaggccgtcaatgaggtgaagcgccaggcgatgacggagctgcagaaggccgtgtctgaggcggagcggaaagcccacgacatgatcacaacagagagggccaagatggagcgcacggtcgccgaggccaaacggcaggcggcggaggacgcactggcagttatcaatcagcaggaggattcaagcgagagttgctggaattgtggccgtaaagcgagtgaaacctgcagtggctgtaacacagcccgatactgtggctcattttgccagcacaaagactgggagaagcaccatcacatctgtggacagaccctgcaggcccagcagcagggagacacacctgcagtcagctcctctgtcacgcccaacagcggggctgggagcccgatggacacaccaccagcagccactccgaggtcaaccaccccgggaaccccttccaccatagagacaacccctcgctag

SEQ ID NO: 283 - RNA, 1704 nt, Homo sapiens
  misc_feature 1..1704: note = Homo sapiens__Q06455-4__RUNX1T1a CDS wt
  source 1..1704: mol_type = mRNA
atgccagactcacctgtggatgtgaagacgcaatctaggctgactcctccaacaatgccacctcccccaactactcaaggagctccaagaaccagttcatttacaccgacaacgttaactaatggcacgagccattctcctacagccttgaatggcgccccctcaccacccaatggcttcagcaatgggccttcctcttcttcctcctcctctctggctaatcaacagctgcccccagcctgtggtgccaggcaactcagcaagctgaaaaggttccttactaccctgcagcagtttggcaatgacatttcacccgagataggagaaagagttcgcaccctcgttctgggactagtgaactccactttgacaattgaagaatttcattccaaactgcaagaagctactaacttcccactgagaccttttgtcatcccatttttgaaggccaacttgcccctgctgcagcgtgagctcctccactgcgcaagactggccaaacagaaccctgcccagtacctcgcccagcatgaacagctgcttctggatgccagcaccacctcacctgttgactcctcagagctgcttctcgatgtgaacgaaaacgggaagaggcgaactccagacagaaccaaagaaaatggctttgacagagagcctttgcactcagaacatccaagcaagcgaccatgcactattagcccaggccagcggtacagtccaaataacggcttatcctaccagcccaatggcctgcctcaccctaccccacctccacctcagcattaccgtttggatgatatggccattgcccaccactacagggactcctatcgacaccccagccacagggacctcagggacagaaacagacctatggggttgcatggcacacgtcaagaagaaatgattgatcacagactaacagacagagaatgggcagaagagtggaaacatcttgaccatctgttaaactgcataatggacatggtagaaaaaacaaggcgatctctcaccgtactaaggcggtgtcaagaagcagaccgggaagaattgaattactggatccggcggtacagtgacgccgaggacttaaaaaaaggtggcggcagtagcagcagccactctaggcagcagagtcccgtcaacccagacccagttgcactagacgcgcatcgggaattccttcacaggcctgcgtctggatacgtgccagaggagatctggaagaaagctgaggaggccgtcaatgaggtgaagcgccaggcgatgacggagctgcagaaggccgtgtctgaggcggagcggaaagcccacgacatgatcacaacagagagggccaagatggagcgcacggtcgccgaggccaaacggcaggcggcggaggacgcactggcagttatcaatcagcaggaggattcaagcgagagttgctggaattgtggccgtaaagcgagtgaaacctgcagtggctgtaacacagcccgatactgtggctcattttgccagcacaaagactgggagaagcaccatcacatctgtggacagaccctgcaggcccagcagcagggagacacacctgcagtcagctcctctgtcacgcccaacagcggggctgggagcccgatggacacaccaccagcagccactccgaggtcaaccaccccgggaaccccttccaccatagagacaacccctcgctag

SEQ ID NO: 284 - RNA, 1284 nt, Homo sapiens
  misc_feature 1..1284: note = Homo sapiens__Q06455-5__RUNX1T1a CDS wt
  source 1..1284: mol_type = mRNA
atgatatctgtcaaaagaaacacttggagagcactgagtttagtaataggtgactgccggaaaaaagggaactttgaatattgtcaagatcgtactgagaagcactccacaatgccagactcacctgtggatgtgaagacgcaatctaggctgactcctccaacaatgccacctcccccaactactcaaggagctccaagaaccagttcatttacaccgacaacgttaactaatggcacgagccattctcctacagccttgaatggcgccccctcaccacccaatggcttcagcaatgggccttcctcttcttcctcctcctctctggctaatcaacagctgcccccagcctgtggtgccaggcaactcagcaagctgaaaaggttccttactaccctgcagcagtttggcaatgacatttcacccgagataggagaaagagttcgcaccctcgttctgggactagtgaactccactttgacaattgaagaatttcattccaaactgcaagaagctactaacttcccactgagaccttttgtcatcccatttttgaaggccaacttgcccctgctgcagcgtgagctcctccactgcgcaagactggccaaacagaaccctgcccagtacctcgcccagcatgaacagctgcttctggatgccagcaccacctcacctgttgactcctcagagctgcttctcgatgtgaacgaaaacgggaagaggcgaactccagacagaaccaaagaaaatggctttgacagagagcctttgcactcagaacatccaagcaagcgaccatgcactattagcccaggccagcggtacagtccaaataacggcttatcctaccagcccaatggcctgcctcaccctaccccacctccacctcagcattaccgtttggatgatatggccattgcccaccactacagggactcctatcgacaccccagccacagggacctcagggacagaaacagacctatggggttgcatggcacacgtcaagaagaaatgattgatcacagactaacagacagagaatgggcagaagagtggaaacatcttgaccatctgttaaactgcataatggacatggtagaaaaaacaaggcgatctctcaccgtactaaggcggtgtcaagaagcagaccgggaagaattgaattactggatccggcggtacagtgacgccgaggacttaaaaaaaggtggcggcagtagcagcagccactctaggcagcagagtcccgtcaacccagacccagttgcactaggatga

SEQ ID NO: 285 - RNA, 1203 nt, Homo sapiens
  misc_feature 1..1203: note = Homo sapiens__Q06455-6__RUNX1T1a CDS wt
  source 1..1203: mol_type = mRNA
atgcctgatcgtactgagaagcactccacaatgccagactcacctgtggatgtgaagacgcaatctaggctgactcctccaacaatgccacctcccccaactactcaaggagctccaagaaccagttcatttacaccgacaacgttaactaatggcacgagccattctcctacagccttgaatggcgccccctcaccacccaatggcttcagcaatgggccttcctcttcttcctcctcctctctggctaatcaacagctgcccccagcctgtggtgccaggcaactcagcaagctgaaaaggttccttactaccctgcagcagtttggcaatgacatttcacccgagataggagaaagagttcgcaccctcgttctgggactagtgaactccactttgacaattgaagaatttcattccaaactgcaagaagctactaacttcccactgagaccttttgtcatcccatttttgaaggccaacttgcccctgctgcagcgtgagctcctccactgcgcaagactggccaaacagaaccctgcccagtacctcgcccagcatgaacagctgcttctggatgccagcaccacctcacctgttgactcctcagagctgcttctcgatgtgaacgaaaacgggaagaggcgaactccagacagaaccaaagaaaatggctttgacagagagcctttgcactcagaacatccaagcaagcgaccatgcactattagcccaggccagcggtacagtccaaataacggcttatcctaccagcccaatggcctgcctcaccctaccccacctccacctcagcattaccgtttggatgatatggccattgcccaccactacagggactcctatcgacaccccagccacagggacctcagggacagaaacagacctatggggttgcatggcacacgtcaagaagaaatgattgatcacagactaacagacagagaatgggcagaagagtggaaacatcttgaccatctgttaaactgcataatggacatggtagaaaaaacaaggcgatctctcaccgtactaaggcggtgtcaagaagcagaccgggaagaattgaattactggatccggcggtacagtgacgccgaggacttaaaaaaaggtggcggcagtagcagcagccactctaggcagcagagtcccgtcaacccagacccagttgcactaggatga

SEQ ID NO: 286 - RNA, 1722 nt, Homo sapiens
  misc_feature 1..1722: note = Homo sapiens__Q06455-1__RUNX1T1a(31-604) CDS wt
  source 1..1722: mol_type = mRNA
cgtactgagaagcactccacaatgccagactcacctgtggatgtgaagacgcaatctaggctgactcctccaacaatgccacctcccccaactactcaaggagctccaagaaccagttcatttacaccgacaacgttaactaatggcacgagccattctcctacagccttgaatggcgccccctcaccacccaatggcttcagcaatgggccttcctcttcttcctcctcctctctggctaatcaacagctgcccccagcctgtggtgccaggcaactcagcaagctgaaaaggttccttactaccctgcagcagtttggcaatgacatttcacccgagataggagaaagagttcgcaccctcgttctgggactagtgaactccactttgacaattgaagaatttcattccaaactgcaagaagctactaacttcccactgagaccttttgtcatcccatttttgaaggccaacttgcccctgctgcagcgtgagctcctccactgcgcaagactggccaaacagaaccctgcccagtacctcgcccagcatgaacagctgcttctggatgccagcaccacctcacctgttgactcctcagagctgcttctcgatgtgaacgaaaacgggaagaggcgaactccagacagaaccaaagaaaatggctttgacagagagcctttgcactcagaacatccaagcaagcgaccatgcactattagcccaggccagcggtacagtccaaataacggcttatcctaccagcccaatggcctgcctcaccctaccccacctccacctcagcattaccgtttggatgatatggccattgcccaccactacagggactcctatcgacaccccagccacagggacctcagggacagaaacagacctatggggttgcatggcacacgtcaagaagaaatgattgatcacagactaacagacagagaatgggcagaagagtggaaacatcttgaccatctgttaaactgcataatggacatggtagaaaaaacaaggcgatctctcaccgtactaaggcggtgtcaagaagcagaccgggaagaattgaattactggatccggcggtacagtgacgccgaggacttaaaaaaaggtggcggcagtagcagcagccactctaggcagcagagtcccgtcaacccagacccagttgcactagacgcgcatcgggaattccttcacaggcctgcgtctggatacgtgccagaggagatctggaagaaagctgaggaggccgtcaatgaggtgaagcgccaggcgatgacggagctgcagaaggccgtgtctgaggcggagcggaaagcccacgacatgatcacaacagagagggccaagatggagcgcacggtcgccgaggccaaacggcaggcggcggaggacgcactggcagttatcaatcagcaggaggattcaagcgagagttgctggaattgtggccgtaaagcgagtgaaacctgcagtggctgtaacacagcccgatactgtggctcattttgccagcacaaagactgggagaagcaccatcacatctgtggacagaccctgcaggcccagcagcagggagacacacctgcagtcagctcctctgtcacgcccaacagcggggctgggagcccgatggacacaccaccagcagccactccgaggtcaaccaccccgggaaccccttccaccatagagacaacccctcgc

SEQ ID NO: 287 - RNA, 1815 nt, Homo sapiens
  misc_feature 1..1815: note = Homo sapiens__O43439-1__RUNX1T1b CDS wt
  source 1..1815: mol_type = mRNA
atggctaaagaatctggaataagcttgaaagaaatacaggtcctggcaaggcaatggaaagttggtcctgagaaaagggtgccagcgatgcctggatcgcctgtggaagtgaagatacagtccagatcctcacctcccaccatgccacccctcccaccaataaatcctggaggaccgaggccagtgtccttcactcctactgcattaagcaatggcatcaaccattctcctcctaccctgaatggtgccccatcaccgccacagagattcagcaatggtcctgcctcctccacatcatctgcactcacaaatcagcaattgccagccacttgtggtgctcgacaactcagcaagttgaaacgctttcttaccactctgcaacagtttggcaatgacatctcccctgagattggggagaaggtgcggactcttgttcttgcactggtgaactcaacagtgacaattgaggaattccactgtaagctccaagaagccacaaactttccccttcgtccttttgtgattccatttctcaaggccaacctgcccctgctgcagcgggaactgctgcactgcgctcgggcggccaagcagaccccatcccagtacctggctcagcacgaacaccttctgctcaacacaagcattgcatcgcctgctgactcgtcagagttgctcatggaggtgcacggaaatgggaagaggcccagtccagagaggagagaagagaatagttttgatagagacacaattgctcctgagcctcctgccaagagagtatgtaccatcagccctgctcctcggcacagtcctgctctcactgtgcccctcatgaatcccgggggccaattccatcctacccctccacctcttcagcattacaccttagaggatattgcaacttctcacctgtatcgggaacccaacaagatgctagagcatcgagaagttcgtgatagacaccacagtcttggtctaaatggaggctatcaagatgagttggtagatcatcgtttgacagaaagggaatgggctgatgaatggaaacatcttgaccatgcgctgaattgcattatggaaatggtagagaaaacaaggcgctctatggcagttctgcggcgctgtcaggaatcagatcgtgaagaactcaactactggaaaagacggtacaatgaaaacacagagctgaggaaaacggggaccgagttggtctccaggcagcacagccctgggagtgcagattctctcagcaatgattctcagagagagttcaacagcaggccaggtacaggatacgtacctgtggagttttggaaaaaaacagaagaagctgtgaataaggtgaaaattcaggccatgtcagaagtacagaaggccgtcgctgaggcagagcagaaagcctttgaagtgattgcaacagagagagcacgaatggagcaaaccatagcggatgtcaagcggcaggccgcagaggatgctttcctcgtcatcaatgagcaagaggagtccacggagaactgctggaactgtggccgcaaagccagcgagacatgcagtggctgcaatatcgcgcgatactgtggctctttctgccagcacaaggactgggagcggcaccaccgcctctgtggtcagaacctgcatggccagagcccccacggccagggccggccgctgcttcctgtaggcaggggctcctctgccaggtccgccgactgcagcgtgcccagcccagccctcgacaagacctcggcaaccacatcgcgttcctcaacacctgcttctgtgacagctatcgacaccaacggactctga

SEQ ID NO: 288 - RNA, 1845 nt, Homo sapiens
  misc_feature 1..1845: note = Homo sapiens__O43439-4__RUNX1T1b CDS wt
  source 1..1845: mol_type = mRNA
atggggtttcaccatgttggccaggctcgtcttgaactcctgacctcaggtgatctgcctgcattggcctcccaacgtgctgggattacagttggtcctgagaaaagggtgccagcgatgcctggatcgcctgtggaagtgaagatacagtccagatcctcacctcccaccatgccacccctcccaccaataaatcctggaggaccgaggccagtgtccttcactcctactgcattaagcaatggcatcaaccattctcctcctaccctgaatggtgccccatcaccgccacagagattcagcaatggtcctgcctcctccacatcatctgcactcacaaatcagcaattgccagccacttgtggtgctcgacaactcagcaagttgaaacgctttcttaccactctgcaacagtttggcaatgacatctcccctgagattggggagaaggtgcggactcttgttcttgcactggtgaactcaacagtgacaattgaggaattccactgtaagctccaagaagccacaaactttccccttcgtccttttgtgattccatttctcaaggccaacctgcccctgctgcagcgggaactgctgcactgcgctcgggcggccaagcagaccccatcccagtacctggctcagcacgaacaccttctgctcaacacaagcattgcatcgcctgctgactcgtcagagttgctcatggaggtgcacggaaatgggaagaggcccagtccagagaggagagaagagaatagttttgatagagacacaattgctcctgagcctcctgccaagagagtatgtaccatcagccctgctcctcggcacagtcctgctctcactgtgcccctcatgaatcccgggggccaattccatcctacccctccacctcttcagcattacaccttagaggatattgcaacttctcacctgtatcgggaacccaacaagatgctagagcatcgagaagttcgtgatagacaccacagtcttggtctaaatggaggctatcaagatgagttggtagatcatcgtttgacagaaagggaatgggctgatgaatggaaacatcttgaccatgcgctgaattgcattatggaaatggtagagaaaacaaggcgctctatggcagttctgcggcgctgtcaggaatcagatcgtgaagaactcaactactggaaaagacggtacaatgaaaacacagagctgaggaaaacggggaccgagttggtctccaggcagcacagccctgggagtgcagattctctcagcaatgattctcagagagagttcaacagcaggccaggtacaggatacgtacctgtggagttttggaaaaaaacagaagaagctgtgaataaggtgaaaattcaggccatgtcagaagtacagaaggccgtcgctgaggcagagcagaaagcctttgaagtgattgcaacagagagagcacgaatggagcaaaccatagcggatgtcaagcggcaggccgcagaggatgctttcctcgtcatcaatgagcaagaggagtccacggagaactgctggaactgtggccgcaaagccagcgagacatgcagtggctgcaatatcgcgcgatactgtggctctttctgccagcacaaggactgggagcggcaccaccgcctctgtggtcagaacctgcatggccagagcccccacggccagggccggccgctgcttcctgtaggcaggggctcctctgccaggtccgccgactgcagcgtgcccagcccagccctcgacaagacctcggcaaccacatcgcgttcctcaacacctgcttctgtgacagctatcgacaccaacggactctga

SEQ ID NO: 289 - RNA, 1788 nt, Homo sapiens
  misc_feature 1..1788: note = Homo sapiens__O43439-5__RUNX1T1b CDS wt
  source 1..1788: mol_type = mRNA
atggtaggcgtccctggagcggccgccttccagcttggtcctgagaaaagggtgccagcgatgcctggatcgcctgtggaagtgaagatacagtccagatcctcacctcccaccatgccacccctcccaccaataaatcctggaggaccgaggccagtgtccttcactcctactgcattaagcaatggcatcaaccattctcctcctaccctgaatggtgccccatcaccgccacagagattcagcaatggtcctgcctcctccacatcatctgcactcacaaatcagcaattgccagccacttgtggtgctcgacaactcagcaagttgaaacgctttcttaccactctgcaacagtttggcaatgacatctcccctgagattggggagaaggtgcggactcttgttcttgcactggtgaactcaacagtgacaattgaggaattccactgtaagctccaagaagccacaaactttccccttcgtccttttgtgattccatttctcaaggccaacctgcccctgctgcagcgggaactgctgcactgcgctcgggcggccaagcagaccccatcccagtacctggctcagcacgaacaccttctgctcaacacaagcattgcatcgcctgctgactcgtcagagttgctcatggaggtgcacggaaatgggaagaggcccagtccagagaggagagaagagaatagttttgatagagacacaattgctcctgagcctcctgccaagagagtatgtaccatcagccctgctcctcggcacagtcctgctctcactgtgcccctcatgaatcccgggggccaattccatcctacccctccacctcttcagcattacaccttagaggatattgcaacttctcacctgtatcgggaacccaacaagatgctagagcatcgagaagttcgtgatagacaccacagtcttggtctaaatggaggctatcaagatgagttggtagatcatcgtttgacagaaagggaatgggctgatgaatggaaacatcttgaccatgcgctgaattgcattatggaaatggtagagaaaacaaggcgctctatggcagttctgcggcgctgtcaggaatcagatcgtgaagaactcaactactggaaaagacggtacaatgaaaacacagagctgaggaaaacggggaccgagttggtctccaggcagcacagccctgggagtgcagattctctcagcaatgattctcagagagagttcaacagcaggccaggtacaggatacgtacctgtggagttttggaaaaaaacagaagaagctgtgaataaggtgaaaattcaggccatgtcagaagtacagaaggccgtcgctgaggcagagcagaaagcctttgaagtgattgcaacagagagagcacgaatggagcaaaccatagcggatgtcaagcggcaggccgcagaggatgctttcctcgtcatcaatgagcaagaggagtccacggagaactgctggaactgtggccgcaaagccagcgagacatgcagtggctgcaatatcgcgcgatactgtggctctttctgccagcacaaggactgggagcggcaccaccgcctctgtggtcagaacctgcatggccagagcccccacggccagggccggccgctgcttcctgtaggcaggggctcctctgccaggtccgccgactgcagcgtgcccagcccagccctcgacaagacctcggcaaccacatcgcgttcctcaacacctgcttctgtgacagctatcgacaccaacggactctga

SEQ ID NO: 290 - RNA, 1728 nt, Homo sapiens
  misc_feature 1..1728: note = Homo sapiens__O43439-2__RUNX1T1b CDS wt
  source 1..1728: mol_type = mRNA
atgcctggatcgcctgtggaagtgaagatacagtccagatcctcacctcccaccatgccacccctcccaccaataaatcctggaggaccgaggccagtgtccttcactcctactgcattaagcaatggcatcaaccattctcctcctaccctgaatggtgccccatcaccgccacagagattcagcaatggtcctgcctcctccacatcatctgcactcacaaatcagcaattgccagccacttgtggtgctcgacaactcagcaagttgaaacgctttcttaccactctgcaacagtttggcaatgacatctcccctgagattggggagaaggtgcggactcttgttcttgcactggtgaactcaacagtgacaattgaggaattccactgtaagctccaagaagccacaaactttccccttcgtccttttgtgattccatttctcaaggccaacctgcccctgctgcagcgggaactgctgcactgcgctcgggcggccaagcagaccccatcccagtacctggctcagcacgaacaccttctgctcaacacaagcattgcatcgcctgctgactcgtcagagttgctcatggaggtgcacggaaatgggaagaggcccagtccagagaggagagaagagaatagttttgatagagacacaattgctcctgagcctcctgccaagagagtatgtaccatcagccctgctcctcggcacagtcctgctctcactgtgcccctcatgaatcccgggggccaattccatcctacccctccacctcttcagcattacaccttagaggatattgcaacttctcacctgtatcgggaacccaacaagatgctagagcatcgagaagttcgtgatagacaccacagtcttggtctaaatggaggctatcaagatgagttggtagatcatcgtttgacagaaagggaatgggctgatgaatggaaacatcttgaccatgcgctgaattgcattatggaaatggtagagaaaacaaggcgctctatggcagttctgcggcgctgtcaggaatcagatcgtgaagaactcaactactggaaaagacggtacaatgaaaacacagagctgaggaaaacggggaccgagttggtctccaggcagcacagccctgggagtgcagattctctcagcaatgattctcagagagagttcaacagcaggccaggtacaggatacgtacctgtggagttttggaaaaaaacagaagaagctgtgaataaggtgaaaattcaggccatgtcagaagtacagaaggccgtcgctgaggcagagcagaaagcctttgaagtgattgcaacagagagagcacgaatggagcaaaccatagcggatgtcaagcggcaggccgcagaggatgctttcctcgtcatcaatgagcaagaggagtccacggagaactgctggaactgtggccgcaaagccagcgagacatgcagtggctgcaatatcgcgcgatactgtggctctttctgccagcacaaggactgggagcggcaccaccgcctctgtggtcagaacctgcatggccagagcccccacggccagggccggccgctgcttcctgtaggcaggggctcctctgccaggtccgccgactgcagcgtgcccagcccagccctcgacaagacctcggcaaccacatcgcgttcctcaacacctgcttctgtgacagctatcgacaccaacggactctga

SEQ ID NO: 291 - RNA, 48 nt, Homo sapiens
  misc_feature 1..48: note = Homo sapiens____RUNX1T1b(short) CDS wt
  source 1..48: mol_type = mRNA
gaggtgggcttctgccacgtcgcccaggtggggctgaagctcctgggc

SEQ ID NO: 292 - RNA, 1749 nt, Homo sapiens
  misc_feature 1..1749: note = Homo sapiens__O43439-1__RUNX1T1b(22-604) CDS wt
  source 1..1749: mol_type = mRNA
ggtcctgagaaaagggtgccagcgatgcctggatcgcctgtggaagtgaagatacagtccagatcctcacctcccaccatgccacccctcccaccaataaatcctggaggaccgaggccagtgtccttcactcctactgcattaagcaatggcatcaaccattctcctcctaccctgaatggtgccccatcaccgccacagagattcagcaatggtcctgcctcctccacatcatctgcactcacaaatcagcaattgccagccacttgtggtgctcgacaactcagcaagttgaaacgctttcttaccactctgcaacagtttggcaatgacatctcccctgagattggggagaaggtgcggactcttgttcttgcactggtgaactcaacagtgacaattgaggaattccactgtaagctccaagaagccacaaactttccccttcgtccttttgtgattccatttctcaaggccaacctgcccctgctgcagcgggaactgctgcactgcgctcgggcggccaagcagaccccatcccagtacctggctcagcacgaacaccttctgctcaacacaagcattgcatcgcctgctgactcgtcagagttgctcatggaggtgcacggaaatgggaagaggcccagtccagagaggagagaagagaatagttttgatagagacacaattgctcctgagcctcctgccaagagagtatgtaccatcagccctgctcctcggcacagtcctgctctcactgtgcccctcatgaatcccgggggccaattccatcctacccctccacctcttcagcattacaccttagaggatattgcaacttctcacctgtatcgggaacccaacaagatgctagagcatcgagaagttcgtgatagacaccacagtcttggtctaaatggaggctatcaagatgagttggtagatcatcgtttgacagaaagggaatgggctgatgaatggaaacatcttgaccatgcgctgaattgcattatggaaatggtagagaaaacaaggcgctctatggcagttctgcggcgctgtcaggaatcagatcgtgaagaactcaactactggaaaagacggtacaatgaaaacacagagctgaggaaaacggggaccgagttggtctccaggcagcacagccctgggagtgcagattctctcagcaatgattctcagagagagttcaacagcaggccaggtacaggatacgtacctgtggagttttggaaaaaaacagaagaagctgtgaataaggtgaaaattcaggccatgtcagaagtacagaaggccgtcgctgaggcagagcagaaagcctttgaagtgattgcaacagagagagcacgaatggagcaaaccatagcggatgtcaagcggcaggccgcagaggatgctttcctcgtcatcaatgagcaagaggagtccacggagaactgctggaactgtggccgcaaagccagcgagacatgcagtggctgcaatatcgcgcgatactgtggctctttctgccagcacaaggactgggagcggcaccaccgcctctgtggtcagaacctgcatggccagagcccccacggccagggccggccgctgcttcctgtaggcaggggctcctctgccaggtccgccgactgcagcgtgcccagcccagccctcgacaagacctcggcaaccacatcgcgttcctcaacacctgcttctgtgacagctatcgacaccaacggactc

SEQ ID NO: 293 - RNA, 1836 nt, Homo sapiens
  misc_feature 1..1836: note = Homo sapiens____CBFbeta(1-165)_SMMHC(1527-1972) CDS wt
  source 1..1836: mol_type = mRNA
atgccgcgcgtcgtgcccgaccagagaagcaagttcgagaacgaggagttttttaggaagctgagccgcgagtgtgagattaagtacacgggcttcagggaccggccccacgaggaacgccaggcacgcttccagaacgcctgccgcgacggccgctcggaaatcgcttttgtggccacaggaaccaatctgtctctccagttttttccggccagctggcagggagaacagcgacaaacacctagccgagagtatgtcgacttagaaagagaagcaggcaaggtatatttgaaggctcccatgattctgaatggagtctgtgttatctggaaaggctggattgatctccaaagactggatggtatgggctgtctggagtttgatgaggagcgagcccagcaggaggatgcattagcacaacaggcctttgaagaggctcggagaaggacacgcgaatttgaagatagagacaggtctcatcgggaggaaatggaggtccatgagctggagaagtccaagcgggccctggagacccagatggaggagatgaagacgcagctggaagagctggaggacgagctgcaagccacggaggacgccaaactgcggctggaagtcaacatgcaggcgctcaagggccagttcgaaagggatctccaagcccgggacgagcagaatgaggagaagaggaggcaactgcagagacagcttcacgagtatgagacggaactggaagacgagcgaaagcaacgtgccctggcagctgcagcaaagaagaagctggaaggggacctgaaagacctggagcttcaggccgactctgccatcaaggggagggaggaagccatcaagcagctacgcaaactgcaggctcagatgaaggactttcaaagagagctggaagatgcccgtgcctccagagatgagatctttgccacagccaaagagaatgagaagaaagccaagagcttggaagcagacctcatgcagctacaagaggacctcgccgccgctgagagggctcgcaaacaagcggacctcgagaaggaggaactggcagaggagctggccagtagcctgtcgggaaggaacgcactccaggacgagaagcgccgcctggaggcccggatcgcccagctggaggaggagctggaggaggagcagggcaacatggaggccatgagcgaccgggtccgcaaagccacacagcaggccgagcagctcagcaacgagctggccacagagcgcagcacggcccagaagaatgagagtgcccggcagcagctcgagcggcagaacaaggagctccggagcaagctccacgagatggagggggccgtcaagtccaagttcaagtccaccatcgcggcgctggaggccaagattgcacagctggaggagcaggtcgagcaggaggccagagagaaacaggcggccaccaagtcgctgaagcagaaagacaagaagctgaaggaaatcttgctgcaggtggaggacgagcgcaagatggccgagcagtacaaggagcaggcagagaaaggcaatgccagggtcaagcagctcaagaggcagctggaggaggcagaggaggagtcccagcgcatcaacgccaaccgcaggaagctgcagcgggagctggatgaggccacggagagcaacgaggccatgggccgcgaggtgaacgcactcaagagcaagctcaggcgaggaaacgagacctctttcgttccttctagaaggtctggaggacgtagagttattgaaaatgcagatggttctgaggaggaaacggacactcgagacgcagacttcaatggaaccaaggccagtgaatga

SEQ ID NO: 294 - RNA, 1551 nt, synthetic construct
  misc_feature 1..1551: note = Artificial____CBFbeta(1-165)_SMMHC(1527-1877) CDS wt
  source 1..1551: mol_type = other RNA
atgccgcgcgtcgtgcccgaccagagaagcaagttcgagaacgaggagttttttaggaagctgagccgcgagtgtgagattaagtacacgggcttcagggaccggccccacgaggaacgccaggcacgcttccagaacgcctgccgcgacggccgctcggaaatcgcttttgtggccacaggaaccaatctgtctctccagttttttccggccagctggcagggagaacagcgacaaacacctagccgagagtatgtcgacttagaaagagaagcaggcaaggtatatttgaaggctcccatgattctgaatggagtctgtgttatctggaaaggctggattgatctccaaagactggatggtatgggctgtctggagtttgatgaggagcgagcccagcaggaggatgcattagcacaacaggcctttgaagaggctcggagaaggacacgcgaatttgaagatagagacaggtctcatcgggaggaaatggaggtccatgagctggagaagtccaagcgggccctggagacccagatggaggagatgaagacgcagctggaagagctggaggacgagctgcaagccacggaggacgccaaactgcggctggaagtcaacatgcaggcgctcaagggccagttcgaaagggatctccaagcccgggacgagcagaatgaggagaagaggaggcaactgcagagacagcttcacgagtatgagacggaactggaagacgagcgaaagcaacgtgccctggcagctgcagcaaagaagaagctggaaggggacctgaaagacctggagcttcaggccgactctgccatcaaggggagggaggaagccatcaagcagctacgcaaactgcaggctcagatgaaggactttcaaagagagctggaagatgcccgtgcctccagagatgagatctttgccacagccaaagagaatgagaagaaagccaagagcttggaagcagacctcatgcagctacaagaggacctcgccgccgctgagagggctcgcaaacaagcggacctcgagaaggaggaactggcagaggagctggccagtagcctgtcgggaaggaacgcactccaggacgagaagcgccgcctggaggcccggatcgcccagctggaggaggagctggaggaggagcagggcaacatggaggccatgagcgaccgggtccgcaaagccacacagcaggccgagcagctcagcaacgagctggccacagagcgcagcacggcccagaagaatgagagtgcccggcagcagctcgagcggcagaacaaggagctccggagcaagctccacgagatggagggggccgtcaagtccaagttcaagtccaccatcgcggcgctggaggccaagattgcacagctggaggagcaggtcgagcaggaggccagagagaaacaggcggccaccaagtcgctgaagcagaaagacaagaagctgaaggaaatcttgctgcaggtggaggacgagcgcaagatggccgagcagtacaaggagcaggcagagaaaggcaatgcctga

SEQ ID NO: 295 - RNA, 612 nt, synthetic construct
  misc_feature 1..612: note = Artificial____CBFbeta(1-165)_Linker_Lifeact CDS wt
  source 1..612: mol_type = other RNA
atgccgcgcgtcgtgcccgaccagagaagcaagttcgagaacgaggagttttttaggaagctgagccgcgagtgtgagattaagtacacgggcttcagggaccggccccacgaggaacgccaggcacgcttccagaacgcctgccgcgacggccgctcggaaatcgcttttgtggccacaggaaccaatctgtctctccagttttttccggccagctggcagggagaacagcgacaaacacctagccgagagtatgtcgacttagaaagagaagcaggcaaggtatatttgaaggctcccatgattctgaatggagtctgtgttatctggaaaggctggattgatctccaaagactggatggtatgggctgtctggagtttgatgaggagcgagcccagcaggaggatgcattagcacaacaggcctttgaagaggctcggagaaggacacgcgaatttgaagatagagacaggtctcatcgggaggaaatggagggcgggagcggcgggtccggcgggagcggcggctccgggggcgggggcgtggccgacctgatcaagaagttcgagagcatcagcaaggaggagggggatccaccggtcgccacctga

SEQ ID NO: 296 - RNA, 579 nt, synthetic construct
  misc_feature 1..579: note = Artificial____CBFbeta(1-165)_HIF1alpha(549-575) CDS wt
  source 1..579: mol_type = other RNA
atgccgcgcgtcgtgcccgaccagagaagcaagttcgagaacgaggagttttttaggaagctgagccgcgagtgtgagattaagtacacgggcttcagggaccggccccacgaggaacgccaggcacgcttccagaacgcctgccgcgacggccgctcggaaatcgcttttgtggccacaggaaccaatctgtctctccagttttttccggccagctggcagggagaacagcgacaaacacctagccgagagtatgtcgacttagaaagagaagcaggcaaggtatatttgaaggctcccatgattctgaatggagtctgtgttatctggaaaggctggattgatctccaaagactggatggtatgggctgtctggagtttgatgaggagcgagcccagcaggaggatgcattagcacaacaggcctttgaagaggctcggagaaggacacgcgaatttgaagatagagacaggtctcatcgggaggaaatggagccattttctactcaggacacagatttagacttggagatgttagctccctatatcccaatggatgatgacttccagttacgttga

SEQ ID NO: 297 - RNA, 624 nt, synthetic construct
  misc_feature 1..624: note Artificial____CBFbeta(1-165)_Linker_HIF1alpha(549-575) CDS wt
  source 1..624: mol_type = other RNA
atgccgcgcgtcgtgcccgaccagagaagcaagttcgagaacgaggagttttttaggaagctgagccgcgagtgtgagattaagtacacgggcttcagggaccggccccacgaggaacgccaggcacgcttccagaacgcctgccgcgacggccgctcggaaatcgcttttgtggccacaggaaccaatctgtctctccagttttttccggccagctggcagggagaacagcgacaaacacctagccgagagtatgtcgacttagaaagagaagcaggcaaggtatatttgaaggctcccatgattctgaatggagtctgtgttatctggaaaggctggattgatctccaaagactggatggtatgggctgtctggagtttgatgaggagcgagcccagcaggaggatgcattagcacaacaggcctttgaagaggctcggagaaggacacgcgaatttgaagatagagacaggtctcatcgggaggaaatggagggcgggagcggcgggtccggcgggagcggcggctccgggggcgggccattttctactcaggacacagatttagacttggagatgttagctccctatatcccaatggatgatgacttccagttacgttga

SEQ ID NO: 298 - RNA, 2259 nt, synthetic construct
  misc_feature 1..2259: note = Artificial____RUNX1(1-177)_N_RUNX1T1a(31-604) CDS wt
  source 1..2259: mol_type = other RNA
atgcgtatccccgtagatgccagcacgagccgccgcttcacgccgccttccaccgcgctgagcccaggcaagatgagcgaggcgttgccgctgggcgccccggacgccggcgctgccctggccggcaagctgaggagcggcgaccgcagcatggtggaggtgctggccgaccacccgggcgagctggtgcgcaccgacagccccaacttcctctgctccgtgctgcctacgcactggcgctgcaacaagaccctgcccatcgctttcaaggtggtggccctaggggatgttccagatggcactctggtcactgtgatggctggcaatgatgaaaactactcggctgagctgagaaatgctaccgcagccatgaagaaccaggttgcaagatttaatgacctcaggtttgtcggtcgaagtggaagagggaaaagcttcactctgaccatcactgtcttcacaaacccaccgcaagtcgccacctaccacagagccatcaaaatcacagtggatgggccccgagaacctcgaaaccgtactgagaagcactccacaatgccagactcacctgtggatgtgaagacgcaatctaggctgactcctccaacaatgccacctcccccaactactcaaggagctccaagaaccagttcatttacaccgacaacgttaactaatggcacgagccattctcctacagccttgaatggcgccccctcaccacccaatggcttcagcaatgggccttcctcttcttcctcctcctctctggctaatcaacagctgcccccagcctgtggtgccaggcaactcagcaagctgaaaaggttccttactaccctgcagcagtttggcaatgacatttcacccgagataggagaaagagttcgcaccctcgttctgggactagtgaactccactttgacaattgaagaatttcattccaaactgcaagaagctactaacttcccactgagaccttttgtcatcccatttttgaaggccaacttgcccctgctgcagcgtgagctcctccactgcgcaagactggccaaacagaaccctgcccagtacctcgcccagcatgaacagctgcttctggatgccagcaccacctcacctgttgactcctcagagctgcttctcgatgtgaacgaaaacgggaagaggcgaactccagacagaaccaaagaaaatggctttgacagagagcctttgcactcagaacatccaagcaagcgaccatgcactattagcccaggccagcggtacagtccaaataacggcttatcctaccagcccaatggcctgcctcaccctaccccacctccacctcagcattaccgtttggatgatatggccattgcccaccactacagggactcctatcgacaccccagccacagggacctcagggacagaaacagacctatggggttgcatggcacacgtcaagaagaaatgattgatcacagactaacagacagagaatgggcagaagagtggaaacatcttgaccatctgttaaactgcataatggacatggtagaaaaaacaaggcgatctctcaccgtactaaggcggtgtcaagaagcagaccgggaagaattgaattactggatccggcggtacagtgacgccgaggacttaaaaaaaggtggcggcagtagcagcagccactctaggcagcagagtcccgtcaacccagacccagttgcactagacgcgcatcgggaattccttcacaggcctgcgtctggatacgtgccagaggagatctggaagaaagctgaggaggccgtcaatgaggtgaagcgccaggcgatgacggagctgcagaaggccgtgtctgaggcggagcggaaagcccacgacatgatcacaacagagagggccaagatggagcgcacggtcgccgaggccaaacggcaggcggcggaggacgcactggcagttatcaatcagcaggaggattcaagcgagagttgctggaattgtggccgtaaagcgagtgaaacctgcagtggctgtaacacagcccgatactgtggctcattttgccagcacaaagactgggagaagcaccatcacatctgtggacagaccctgcaggcccagcagcagggagacacacctgcagtcagctcctctgtcacgcccaacagcggggctgggagcccgatggacacaccaccagcagccactccgaggtcaaccaccccgggaaccccttccaccatagagacaacccctcgctga

SEQ ID NO: 299 - RNA, 774 nt, synthetic construct
  misc_feature 1..774: note = Artificial____RUNX1(1-241)_RUNX1T1b(short) CDS wt
  source 1..774: mol_type = other RNA
atgcgtatccccgtagatgccagcacgagccgccgcttcacgccgccttccaccgcgctgagcccaggcaagatgagcgaggcgttgccgctgggcgccccggacgccggcgctgccctggccggcaagctgaggagcggcgaccgcagcatggtggaggtgctggccgaccacccgggcgagctggtgcgcaccgacagccccaacttcctctgctccgtgctgcctacgcactggcgctgcaacaagaccctgcccatcgctttcaaggtggtggccctaggggatgttccagatggcactctggtcactgtgatggctggcaatgatgaaaactactcggctgagctgagaaatgctaccgcagccatgaagaaccaggttgcaagatttaatgacctcaggtttgtcggtcgaagtggaagagggaaaagcttcactctgaccatcactgtcttcacaaacccaccgcaagtcgccacctaccacagagccatcaaaatcacagtggatgggccccgagaacctcgaagacatcggcagaaactagatgatcagaccaagcccgggagcttgtccttttccgagcggctcagtgaactggagcagctgcggcgcacagccatgagggtcagcccacaccacccagcccccacgcccaaccctcgtgcctccctgaaccactccactgcctttaaccctcagcctcagagtcagatgcaggaggtgggcttctgccacgtcgcccaggtggggctgaagctcctgggctga

SEQ ID NO: 300 - RNA, 2478 nt, synthetic construct
  misc_feature 1..2478: note = Artificial____RUNX1(1-241)_V_RUNX1T1b(22-604) CDS wt
  source 1..2478: mol_type = other RNA
atgcgtatccccgtagatgccagcacgagccgccgcttcacgccgccttccaccgcgctgagcccaggcaagatgagcgaggcgttgccgctgggcgccccggacgccggcgctgccctggccggcaagctgaggagcggcgaccgcagcatggtggaggtgctggccgaccacccgggcgagctggtgcgcaccgacagccccaacttcctctgctccgtgctgcctacgcactggcgctgcaacaagaccctgcccatcgctttcaaggtggtggccctaggggatgttccagatggcactctggtcactgtgatggctggcaatgatgaaaactactcggctgagctgagaaatgctaccgcagccatgaagaaccaggttgcaagatttaatgacctcaggtttgtcggtcgaagtggaagagggaaaagcttcactctgaccatcactgtcttcacaaacccaccgcaagtcgccacctaccacagagccatcaaaatcacagtggatgggccccgagaacctcgaagacatcggcagaaactagatgatcagaccaagcccgggagcttgtccttttccgagcggctcagtgaactggagcagctgcggcgcacagccatgagggtcagcccacaccacccagcccccacgcccaaccctcgtgcctccctgaaccactccactgcctttaaccctcagcctcagagtcagatgcaggtgggtcctgagaaaagggtgccagcgatgcctggatcgcctgtggaagtgaagatacagtccagatcctcacctcccaccatgccacccctcccaccaataaatcctggaggaccgaggccagtgtccttcactcctactgcattaagcaatggcatcaaccattctcctcctaccctgaatggtgccccatcaccgccacagagattcagcaatggtcctgcctcctccacatcatctgcactcacaaatcagcaattgccagccacttgtggtgctcgacaactcagcaagttgaaacgctttcttaccactctgcaacagtttggcaatgacatctcccctgagattggggagaaggtgcggactcttgttcttgcactggtgaactcaacagtgacaattgaggaattccactgtaagctccaagaagccacaaactttccccttcgtccttttgtgattccatttctcaaggccaacctgcccctgctgcagcgggaactgctgcactgcgctcgggcggccaagcagaccccatcccagtacctggctcagcacgaacaccttctgctcaacacaagcattgcatcgcctgctgactcgtcagagttgctcatggaggtgcacggaaatgggaagaggcccagtccagagaggagagaagagaatagttttgatagagacacaattgctcctgagcctcctgccaagagagtatgtaccatcagccctgctcctcggcacagtcctgctctcactgtgcccctcatgaatcccgggggccaattccatcctacccctccacctcttcagcattacaccttagaggatattgcaacttctcacctgtatcgggaacccaacaagatgctagagcatcgagaagttcgtgatagacaccacagtcttggtctaaatggaggctatcaagatgagttggtagatcatcgtttgacagaaagggaatgggctgatgaatggaaacatcttgaccatgcgctgaattgcattatggaaatggtagagaaaacaaggcgctctatggcagttctgcggcgctgtcaggaatcagatcgtgaagaactcaactactggaaaagacggtacaatgaaaacacagagctgaggaaaacggggaccgagttggtctccaggcagcacagccctgggagtgcagattctctcagcaatgattctcagagagagttcaacagcaggccaggtacaggatacgtacctgtggagttttggaaaaaaacagaagaagctgtgaataaggtgaaaattcaggccatgtcagaagtacagaaggccgtcgctgaggcagagcagaaagcctttgaagtgattgcaacagagagagcacgaatggagcaaaccatagcggatgtcaagcggcaggccgcagaggatgctttcctcgtcatcaatgagcaagaggagtccacggagaactgctggaactgtggccgcaaagccagcgagacatgcagtggctgcaatatcgcgcgatactgtggctctttctgccagcacaaggactgggagcggcaccaccgcctctgtggtcagaacctgcatggccagagcccccacggccagggccggccgctgcttcctgtaggcaggggctcctctgccaggtccgccgactgcagcgtgcccagcccagccctcgacaagacctcggcaaccacatcgcgttcctcaacacctgcttctgtgacagctatcgacaccaacggactctga

SEQ ID NO: 301 - RNA, 2478 nt, synthetic construct
  misc_feature 1..2478: note = Artificial____RUNX1(1-241)_I_RUNX1T1b(22-604) CDS wt
  source 1..2478: mol_type = other RNA
atgcgtatccccgtagatgccagcacgagccgccgcttcacgccgccttccaccgcgctgagcccaggcaagatgagcgaggcgttgccgctgggcgccccggacgccggcgctgccctggccggcaagctgaggagcggcgaccgcagcatggtggaggtgctggccgaccacccgggcgagctggtgcgcaccgacagccccaacttcctctgctccgtgctgcctacgcactggcgctgcaacaagaccctgcccatcgctttcaaggtggtggccctaggggatgttccagatggcactctggtcactgtgatggctggcaatgatgaaaactactcggctgagctgagaaatgctaccgcagccatgaagaaccaggttgcaagatttaatgacctcaggtttgtcggtcgaagtggaagagggaaaagcttcactctgaccatcactgtcttcacaaacccaccgcaagtcgccacctaccacagagccatcaaaatcacagtggatgggccccgagaacctcgaagacatcggcagaaactagatgatcagaccaagcccgggagcttgtccttttccgagcggctcagtgaactggagcagctgcggcgcacagccatgagggtcagcccacaccacccagcccccacgcccaaccctcgtgcctccctgaaccactccactgcctttaaccctcagcctcagagtcagatgcagatcggtcctgagaaaagggtgccagcgatgcctggatcgcctgtggaagtgaagatacagtccagatcctcacctcccaccatgccacccctcccaccaataaatcctggaggaccgaggccagtgtccttcactcctactgcattaagcaatggcatcaaccattctcctcctaccctgaatggtgccccatcaccgccacagagattcagcaatggtcctgcctcctccacatcatctgcactcacaaatcagcaattgccagccacttgtggtgctcgacaactcagcaagttgaaacgctttcttaccactctgcaacagtttggcaatgacatctcccctgagattggggagaaggtgcggactcttgttcttgcactggtgaactcaacagtgacaattgaggaattccactgtaagctccaagaagccacaaactttccccttcgtccttttgtgattccatttctcaaggccaacctgcccctgctgcagcgggaactgctgcactgcgctcgggcggccaagcagaccccatcccagtacctggctcagcacgaacaccttctgctcaacacaagcattgcatcgcctgctgactcgtcagagttgctcatggaggtgcacggaaatgggaagaggcccagtccagagaggagagaagagaatagttttgatagagacacaattgctcctgagcctcctgccaagagagtatgtaccatcagccctgctcctcggcacagtcctgctctcactgtgcccctcatgaatcccgggggccaattccatcctacccctccacctcttcagcattacaccttagaggatattgcaacttctcacctgtatcgggaacccaacaagatgctagagcatcgagaagttcgtgatagacaccacagtcttggtctaaatggaggctatcaagatgagttggtagatcatcgtttgacagaaagggaatgggctgatgaatggaaacatcttgaccatgcgctgaattgcattatggaaatggtagagaaaacaaggcgctctatggcagttctgcggcgctgtcaggaatcagatcgtgaagaactcaactactggaaaagacggtacaatgaaaacacagagctgaggaaaacggggaccgagttggtctccaggcagcacagccctgggagtgcagattctctcagcaatgattctcagagagagttcaacagcaggccaggtacaggatacgtacctgtggagttttggaaaaaaacagaagaagctgtgaataaggtgaaaattcaggccatgtcagaagtacagaaggccgtcgctgaggcagagcagaaagcctttgaagtgattgcaacagagagagcacgaatggagcaaaccatagcggatgtcaagcggcaggccgcagaggatgctttcctcgtcatcaatgagcaagaggagtccacggagaactgctggaactgtggccgcaaagccagcgagacatgcagtggctgcaatatcgcgcgatactgtggctctttctgccagcacaaggactgggagcggcaccaccgcctctgtggtcagaacctgcatggccagagcccccacggccagggccggccgctgcttcctgtaggcaggggctcctctgccaggtccgccgactgcagcgtgcccagcccagccctcgacaagacctcggcaaccacatcgcgttcctcaacacctgcttctgtgacagctatcgacaccaacggactctga

SEQ ID NO: 302 - RNA, 549 nt, synthetic construct
  misc_feature 1..549: note = Homo sapiens__Q13951-1__CBFbeta CDS wt mod
  source 1..549: mol_type = other RNA
atgccgcgcgtcgtgcccgaccagagaagcaagtttgagaacgaggagttctttaggaagctgagccgcgagtgtgagattaagtacacgggctttagggaccggccccacgaggaacgccaggcacgcttccagaacgcctgccgcgacggccgctcggaaatcgcttttgtggccacaggaaccaatctgtctctccagttctttccggccagctggcagggagaacagcgacaaacacctagccgagagtatgtcgacttagaaagagaagcaggcaaggtatatttgaaggctcccatgattctgaatggagtctgtgttatctggaaaggctggattgatctccaaagactggatggtatgggctgtctggagtttgatgaggagcgagcccagcaggaggatgcattagcacaacaggcctttgaagaggctcggagaaggacacgcgaatttgaagatagagacaggtctcatcgggaggaaatggaggtgagagtttcacagctgctggcagtaactggcaagaagacaacaagaccctga

SEQ ID NO: 303 - RNA, 672 nt, synthetic construct; identical to SEQ ID NO: 241
  misc_feature 1..672: note = Homo sapiens__A0A494C0A9__CBFbeta CDS wt mod
  source 1..672: mol_type = other RNA

SEQ ID NO: 304 - RNA, 609 nt, synthetic construct; identical to SEQ ID NO: 242
  misc_feature 1..609: note = Homo sapiens__J3KRT0__CBFbeta CDS wt mod
  source 1..609: mol_type = other RNA

SEQ ID NO: 305 - RNA, 564 nt, synthetic construct; identical to SEQ ID NO: 243
  misc_feature 1..564: note = Homo sapiens__Q13951-2__CBFbeta CDS wt mod
  source 1..564: mol_type = other RNA

SEQ ID NO: 306 - RNA, 423 nt, synthetic construct
  misc_feature 1..423: note = Homo sapiens__Q13951-1__CBFbeta(1-141) CDS wt mod
  source 1..423: mol_type = other RNA
atgccgcgcgtcgtgcccgaccagagaagcaagtttgagaacgaggagttctttaggaagctgagccgcgagtgtgagattaagtacacgggctttagggaccggccccacgaggaacgccaggcacgcttccagaacgcctgccgcgacggccgctcggaaatcgcttttgtggccacaggaaccaatctgtctctccagttctttccggccagctggcagggagaacagcgacaaacacctagccgagagtatgtcgacttagaaagagaagcaggcaaggtatatttgaaggctcccatgattctgaatggagtctgtgttatctggaaaggctggattgatctccaaagactggatggtatgggctgtctggagtttgatgaggagcgagcccagcaggaggatgcattagcacaacag

SEQ ID NO: 307 - RNA, 495 nt, synthetic construct
  misc_feature 1..495: note = Homo sapiens__Q13951-1__CBFbeta(1-165) CDS wt mod
  source 1..495: mol_type = other RNA
atgccgcgcgtcgtgcccgaccagagaagcaagtttgagaacgaggagttctttaggaagctgagccgcgagtgtgagattaagtacacgggctttagggaccggccccacgaggaacgccaggcacgcttccagaacgcctgccgcgacggccgctcggaaatcgcttttgtggccacaggaaccaatctgtctctccagttctttccggccagctggcagggagaacagcgacaaacacctagccgagagtatgtcgacttagaaagagaagcaggcaaggtatatttgaaggctcccatgattctgaatggagtctgtgttatctggaaaggctggattgatctccaaagactggatggtatgggctgtctggagtttgatgaggagcgagcccagcaggaggatgcattagcacaacaggcctttgaagaggctcggagaaggacacgcgaatttgaagatagagacaggtctcatcgggaggaaatggag

SEQ ID NO: 308 - RNA, 5919 nt, synthetic construct
  misc_feature 1..5919: note = Homo sapiens__P35749-1__SMMHC CDS wt mod
  source 1..5919: mol_type = other RNA
atggcgcagaagggccaactcagtgacgatgagaagttcctctttgtggacaaaaacttcatcaacagcccagtggcccaggctgactgggccgccaagagactcgtctgggtcccctcggagaagcagggcttcgaggcagccagcattaaggaggagaagggggatgaggtggttgtggagctggtggagaatggcaagaaggtcacggttgggaaagatgacatccagaagatgaacccacccaagttctccaaggtggaggacatggcggagctgacgtgcctcaacgaagcctccgtgctacacaacctgagggagcggtacttctcagggctaatatatacgtactctggcctcttctgcgtggtggtcaacccctataaacacctgcccatctactcggagaagatcgtcgacatgtacaagggcaagaagaggcacgagatgccgcctcacatctacgccatcgcagacacggcctaccggagcatgcttcaagatcgggaggaccagtccattctatgcacaggcgagtctggagccgggaaaaccgaaaacaccaagaaggtcattcagtacctggccgtggtggcctcctcccacaagggcaagaaagacacaagtatcacgggagagctggaaaagcagcttctacaagcaaacccgattctggaggctttcggcaacgccaaaacagtgaagaacgacaactcctcacgattcggcaaattcatccgcatcaacttcgacgtcacgggttacatcgtgggagccaacattgagacctatctgctagaaaaatcacgggcaattcgccaagccagagacgagaggacattccacatcttttactacatgattgctggagccaaggagaagatgagaagtgacttgcttttggagggcttcaacaactacaccttcctctccaatggctttgtgcccatcccagcagcccaggatgatgagatgttccaggaaaccgtggaggccatggcaatcatgggtttcagcgaggaggagcagctatccatattgaaggtggtatcatcggtcctgcagcttggaaatatcgtcttcaagaaggaaagaaacacagaccaggcgtccatgccagataacacagctgctcagaaagtttgccacctcatgggaattaatgtgacagatttcaccagatccatcctcactcctcgtatcaaggttgggcgagatgtggtacagaaagctcagacaaaagaacaggctgactttgctgtagaggctttggccaaggcaacatatgagcgccttttccgctggatactcacccgcgtgaacaaagccctggacaagacccatcggcaaggggcttccttcctggggatcctggatatagctggatttgagatctttgaggtgaactccttcgagcagctgtgcatcaactacaccaacgagaagctgcagcagctgttcaaccacaccatgttcatcctggagcaggaggagtaccagcgcgagggcatcgagtggaacttcatcgactttgggctggacctacagccctgcatcgagctcatcgagcgaccgaacaaccctccaggtgtgctggccctgctggacgaggaatgctggttccccaaagccacggacaagtctttcgtggagaagctgtgcacggagcagggcagccaccccaagttccagaagcccaagcagctcaaggacaagactgagttctccatcatccattatgctgggaaggtggactataatgcgagtgcctggctgaccaagaatatggacccgctgaatgacaacgtgacttccctgctcaatgcctcctccgacaagtttgtggccgacctgtggaaggacgtggaccgcatcgtgggcctggaccagatggccaagatgacggagagctcgctgcccagcgcctccaagaccaagaagggcatgttccgcacagtggggcagctgtacaaggagcagctgggcaagctgatgaccacgctacgcaacaccacgcccaacttcgtgcgctgcatcatccccaaccacgagaagaggtccggcaagctggatgcgttcctggtgctggagcagctgcggtgcaatggggtgctggaaggcattcgcatctgccggcagggcttccccaaccggatcgtcttccaggagttccgccaacgctacgagatcctggcggcgaatgccatccccaaaggcttcatggacgggaagcaggcctgcattctcatgatcaaagccctggaacttgaccccaacttatacaggatagggcagagcaaaatcttcttccgaactggcgtcctggcccacctagaggaggagcgagatttgaagatcaccgatgtcatcatggccttccaggcgatgtgtcgtggctacttggccagaaaggcttttgccaagaggcagcagcagctgaccgccatgaaggtgattcagaggaactgcgccgcctacctcaagctgcggaactggcagtggtggaggcttttcaccaaagtgaagccactgctgcaggtgacacggcaggaggaggagatgcaggccaaggaggatgaactgcagaagaccaaggagcggcagcagaaggcagagaatgagcttaaggagctggaacagaagcactcgcagctgaccgaggagaagaacctgctacaggaacagctgcaggcagagacagagctgtatgcagaggctgaggagatgcgggtgcggctggcggccaagaagcaggagctggaggagatactgcatgagatggaggcccgcctggaggaggaggaagacaggggccagcagctacaggctgaaaggaagaagatggcccagcagatgctggaccttgaagaacagctggaggaggaggaagctgccaggcagaagctgcaacttgagaaggtcacggctgaggccaagatcaagaaactggaggatgagatcctggtcatggatgatcagaacaataaactatcaaaagaacgaaaactccttgaggagaggattagtgacttaacgacaaatcttgcagaagaggaagaaaaggccaagaatcttaccaagctgaaaaacaagcatgaatctatgatttcagaactggaagtgcggctaaagaaggaagaaaagagccgacaggagctggagaagctgaaacggaagctggagggtgatgccagcgacttccacgagcagatcgctgacctccaggcgcagatcgcagagctcaagatgcagctggccaagaaggaggaggagctgcaggcggccctggccaggcttgacgatgaaatcgctcagaagaacaatgccctgaagaagatccgggagctggagggccacatctcagacctccaggaggacctggactcagagcgggccgccaggaacaaggctgaaaagcagaagcgagacctcggcgaggagctggaggccctaaagacagagctggaagacacactggacagcacagccactcagcaggagctcagggccaagagggagcaggaggtgacggtgctgaagaaggccctggatgaagagacgcggtcccatgaggctcaggtccaggagatgaggcagaaacacgcacaggcggtggaggagctcacagagcagcttgagcagttcaagagggccaaggcgaacctagacaagaataagcagacgctggagaaagagaacgcagacctggccggggagctgcgggtcctgggccaggccaagcaggaggtggaacataagaagaagaagctggaggcgcaggtgcaggagctgcagtccaagtgcagcgatggggagcgggcccgggcggagctcaatgacaaagtccacaagctgcagaatgaagttgagagcgtcacagggatgcttaacgaggccgaggggaaggccattaagctggccaaggacgtggcgtccctcagttcccagctccaggacacccaggagctgcttcaagaagaaacccggcagaagctcaacgtgtctacgaagctgcgccagctggaggaggagcggaacagcctgcaagaccagctggacgaggagatggaggccaagcagaacctggagcgccacatctccactctcaacatccagctctccgactcgaagaagaagctgcaggactttgccagcaccgtggaagctctggaagaggggaagaagaggttccagaaggagatcgagaacctcacccagcagtacgaggagaaggcggccgcttatgataaactggaaaagaccaagaacaggcttcagcaggagctggacgacctggttgttgatttggacaaccagcggcaactcgtgtccaacctggaaaagaagcagaggaaatttgatcagttgttagccgaggagaaaaacatctcttccaaatacgcggatgagagggacagagctgaggcagaagccagggagaaggaaaccaaggccctgtccctggctcgggcccttgaagaggccttggaagccaaagaggaactcgagcggaccaacaaaatgctcaaagccgaaatggaagacctggtcagctccaaggatgacgtgggcaagaacgtccatgagctggagaagtccaagcgggccctggagacccagatggaggagatgaagacgcagctggaggaactggaggacgagctgcaagccacggaggacgccaaactgcggctggaagtcaacatgcaggcgctcaagggccagttcgaaagggatctccaagcccgggacgagcagaatgaggagaagaggaggcaactgcagagacagcttcacgagtatgagacggaactggaagacgagcgaaagcaacgtgccctggcagctgcagcaaagaagaagctggaaggggacctgaaagacctggagcttcaggccgactctgccatcaaggggagggaggaagccatcaagcagctacgcaaactgcaggctcagatgaaggactttcaaagagagctggaagatgcccgtgcctccagagatgagatctttgccacagccaaagagaatgagaagaaagccaagagcttggaagcagacctcatgcagctacaagaggacctcgccgccgctgagagggctcgcaaacaagcggacctcgagaaggaggaactggcagaggagctggccagtagcctgtcgggaaggaacgcactccaggacgagaagcgccgcctggaggcccggatcgcccagctggaggaggagctggaggaggagcagggcaacatggaggccatgagcgaccgggtccgcaaagccacacagcaggccgagcagctcagcaacgagctggccacagagcgcagcacggcccagaagaatgagagtgcccggcagcagctcgagcggcagaacaaggagctccggagcaagctccacgagatggagggggccgtcaagtccaagttcaagtccaccatcgcggcgctggaggccaagattgcacagctggaggagcaggtcgagcaggaggccagagagaaacaggcggccaccaagtcgctgaagcagaaagacaagaagctgaaggaaatcttgctccaggtggaggacgagcgcaagatggccgagcagtacaaggagcaggcagagaaaggcaatgccagggtcaagcagctgaagaggcagctggaggaggcagaggaggagtcccagcgcatcaacgccaaccgcaggaagctgcagcgggagctggatgaggccacggagagcaacgaggccatgggccgcgaggtgaacgcactcaagagcaagctcaggcgaggaaacgagacctctttcgttccttccagaaggtctggaggacgtagagttattgaaaatgcagatggttctgaggaggaaacggacactcgagacgcagacttcaatggaaccaaggccagtgaatga

SEQ ID NO: 309 - RNA, 5940 nt, synthetic construct; identical to SEQ ID NO: 247
  misc_feature 1..5940: note = Homo sapiens__P35749-2__SMMHC CDS wt mod
  source 1..5940: mol_type = other RNA

SEQ ID NO: 310 - RNA, 5838 nt, synthetic construct; identical to SEQ ID NO: 248
  misc_feature 1..5838: note = Homo sapiens__P35749-3__SMMHC CDS wt mod
  source 1..5838: mol_type = other RNA

SEQ ID NO: 311 - RNA, 5817 nt, synthetic construct; identical to SEQ ID NO: 249
  misc_feature 1..5817: note = Homo sapiens__P35749-4__SMMHC CDS wt mod
  source 1..5817: mol_type = other RNA

SEQ ID NO: 312 - RNA, 1338 nt, synthetic construct
  misc_feature 1..1338: note = Homo sapiens__P35749-1__SMMHC(1527-1972) CDS wt mod
  source 1..1338: mol_type = other RNA
gtccatgagctggagaagtccaagcgggccctggagacccagatggaggagatgaagacgcagctggaggaactggaggacgagctgcaagccacggaggacgccaaactgcggctggaagtcaacatgcaggcgctcaagggccagttcgaaagggatctccaagcccgggacgagcagaatgaggagaagaggaggcaactgcagagacagcttcacgagtatgagacggaactggaagacgagcgaaagcaacgtgccctggcagctgcagcaaagaagaagctggaaggggacctgaaagacctggagcttcaggccgactctgccatcaaggggagggaggaagccatcaagcagctacgcaaactgcaggctcagatgaaggactttcaaagagagctggaagatgcccgtgcctccagagatgagatctttgccacagccaaagagaatgagaagaaagccaagagcttggaagcagacctcatgcagctacaagaggacctcgccgccgctgagagggctcgcaaacaagcggacctcgagaaggaggaactggcagaggagctggccagtagcctgtcgggaaggaacgcactccaggacgagaagcgccgcctggaggcccggatcgcccagctggaggaggagctggaggaggagcagggcaacatggaggccatgagcgaccgggtccgcaaagccacacagcaggccgagcagctcagcaacgagctggccacagagcgcagcacggcccagaagaatgagagtgcccggcagcagctcgagcggcagaacaaggagctccggagcaagctccacgagatggagggggccgtcaagtccaagttcaagtccaccatcgcggcgctggaggccaagattgcacagctggaggagcaggtcgagcaggaggccagagagaaacaggcggccaccaagtcgctgaagcagaaagacaagaagctgaaggaaatcttgctccaggtggaggacgagcgcaagatggccgagcagtacaaggagcaggcagagaaaggcaatgccagggtcaagcagctgaagaggcagctggaggaggcagaggaggagtcccagcgcatcaacgccaaccgcaggaagctgcagcgggagctggatgaggccacggagagcaacgaggccatgggccgcgaggtgaacgcactcaagagcaagctcaggcgaggaaacgagacctctttcgttccttctagaaggtctggaggacgtagagttattgaaaatgcagatggttctgaggaggaaacggacactcgagacgcagacttcaatggaaccaaggccagtgaa

SEQ ID NO: 313 - RNA, 1053 nt, synthetic construct
  misc_feature 1..1053: note = Homo sapiens__P35749-1__SMMHC(1527-1877) CDS wt mod
  source 1..1053: mol_type = other RNA
gtccatgagctggagaagtccaagcgggccctggagacccagatggaggagatgaagacgcagctggaggaactggaggacgagctgcaagccacggaggacgccaaactgcggctggaagtcaacatgcaggcgctcaagggccagttcgaaagggatctccaagcccgggacgagcagaatgaggagaagaggaggcaactgcagagacagcttcacgagtatgagacggaactggaagacgagcgaaagcaacgtgccctggcagctgcagcaaagaagaagctggaaggggacctgaaagacctggagcttcaggccgactctgccatcaaggggagggaggaagccatcaagcagctacgcaaactgcaggctcagatgaaggactttcaaagagagctggaagatgcccgtgcctccagagatgagatctttgccacagccaaagagaatgagaagaaagccaagagcttggaagcagacctcatgcagctacaagaggacctcgccgccgctgagagggctcgcaaacaagcggacctcgagaaggaggaactggcagaggagctggccagtagcctgtcgggaaggaacgcactccaggacgagaagcgccgcctggaggcccggatcgcccagctggaggaggagctggaggaggagcagggcaacatggaggccatgagcgaccgggtccgcaaagccacacagcaggccgagcagctcagcaacgagctggccacagagcgcagcacggcccagaagaatgagagtgcccggcagcagctcgagcggcagaacaaggagctccggagcaagctccacgagatggagggggccgtcaagtccaagttcaagtccaccatcgcggcgctggaggccaagattgcacagctggaggagcaggtcgagcaggaggccagagagaaacaggcggccaccaagtcgctgaagcagaaagacaagaagctgaaggaaatcttgctccaggtggaggacgagcgcaagatggccgagcagtacaaggagcaggcagagaaaggcaatgcc

SEQ ID NO: 314 - RNA, 492 nt, synthetic construct
  misc_feature 1..492: note = Homo sapiens__P35749-1__SMMHC(1809-1972) CDS wt mod
  source 1..492: mol_type = other RNA
aagtccaagttcaagtccaccatcgcggcgctggaggccaagattgcacagctggaggagcaggtcgagcaggaggccagagagaaacaggcggccaccaagtcgctgaagcagaaagacaagaagctgaaggaaatcttgctccaggtggaggacgagcgcaagatggccgagcagtacaaggagcaggcagagaaaggcaatgccagggtcaagcagctgaagaggcagctggaggaggcagaggaggagtcccagcgcatcaacgccaaccgcaggaagctgcagcgggagctggatgaggccacggagagcaacgaggccatgggccgcgaggtgaacgcactcaagagcaagctcaggcgaggaaacgagacctctttcgttccttctagaaggtctggaggacgtagagttattgaaaatgcagatggttctgaggaggaaacggacactcgagacgcagacttcaatggaaccaaggccagtgaa

SEQ ID NO: 315 - RNA, 207 nt, synthetic construct
  misc_feature 1..207: note = Homo sapiens__P35749-1__SMMHC(1809-1877) CDS wt mod
  source 1..207: mol_type = other RNA
aagtccaagttcaagtccaccatcgcggcgctggaggccaagattgcacagctggaggagcaggtcgagcaggaggccagagagaaacaggcggccaccaagtcgctgaagcagaaagacaagaagctgaaggaaatcttgctccaggtggaggacgagcgcaagatggccgagcagtacaaggagcaggcagagaaaggcaatgcc

SEQ ID NO: 316 - RNA, 69 nt, synthetic construct
  misc_feature 1..69: note = Artificial____Lifeact CDS wt mod
  source 1..69: mol_type = other RNA
ggcgtggccgacctgatcaagaagttcgagagcatctccaaggaggagggggacccgcccgtcgccacc

SEQ ID NO: 317 - RNA, 51 nt, synthetic construct; identical to SEQ ID NO: 255
  misc_feature 1..51: note = Saccharomyces cerevisiae S288C__NP_014882.4__Lifeact(1-17) CDS wt mod
  source 1..51: mol_type = other RNA

SEQ ID NO: 318 - RNA, 2481 nt, synthetic construct
  misc_feature 1..2481: note = Homo sapiens__Q16665-1__HIF1alpha CDS wt mod
  source 1..2481: mol_type = other RNA
atggagggcgccggcggcgcgaacgacaagaaaaagataagttctgaacgtcgaaaagaaaagtctcgagatgcagccagatctcggcgaagtaaagaatctgaagttttctatgagcttgctcatcagttgccacttccacataatgtgagttcgcatcttgataaggcctctgtgatgaggcttaccatcagctatttgcgtgtgaggaaacttctggatgctggtgatttggatattgaagatgacatgaaagcacagatgaattgcttttatttgaaagccttggatggttttgttatggttctcacagatgatggtgacatgatttacatttctgataatgtgaacaaatacatgggattaactcagtttgaactaactggacacagtgtgtttgattttactcatccatgtgaccatgaggaaatgagagaaatgcttacacacagaaatggccttgtgaaaaagggtaaagaacaaaacacacagcggagcttctttctcagaatgaagtgtaccctaactagccgaggaagaactatgaacataaagtctgcaacatggaaggtattgcactgcacaggccacattcacgtatatgataccaacagtaaccaacctcagtgtgggtataagaaaccacctatgacctgcttggtgctgatttgtgaacccattcctcacccatcaaatattgaaattcctttagatagcaagactttcctcagtcgacacagcctggatatgaaattttcttattgtgatgaaagaattaccgaattgatgggatatgagccagaagaacttttaggccgctcaatttatgaatattatcatgctttggactctgatcatctgaccaaaactcatcatgatatgtttactaaaggacaagtcaccacaggacagtacaggatgcttgccaaaagaggtggatatgtctgggttgaaactcaagcaactgtcatatataacaccaagaactctcaaccacagtgcattgtatgtgtgaattacgttgtgagtggtattattcagcacgacttgattttctcccttcaacaaacagaatgtgtccttaaaccggttgaatcttcagatatgaaaatgactcagctattcaccaaagttgaatcagaagatacaagtagcctctttgacaaacttaagaaggaacctgatgctttaactttgctggccccagccgctggagacacaatcatatctttagattttggcagcaacgacacagaaactgatgaccagcaacttgaggaagtaccattatataatgatgtaatgctcccctcacccaacgaaaaattacagaatataaatttggcaatgtctccattacccaccgctgaaacgccaaagccacttcgaagtagtgctgaccctgcactcaatcaagaagttgcattaaaattagaaccaaatccagagtcactggaactttcttttaccatgccccagattcaggatcagacacctagtccttccgatggaagcactagacaaagttcacctgagcctaatagtcccagtgaatattgtttttatgtggatagtgatatggtcaatgagttcaagttggaattggtagaaaaactttttgctgaagacacagaagcaaagaacccattttctactcaggacacagatttagacttggagatgttagctccctatatcccaatggatgatgacttccagttacgttccttcgatcagttgtcaccattagaaagcagttccgcaagccctgaaagcgcaagtcctcaaagcacagttacagtattccagcagactcaaatacaagaacctactgctaatgccaccactaccactgccaccactgatgaattaaaaacagtgacaaaagaccgtatggaagacattaaaatattgattgcatctccatctcctacccacatacataaagaaactacaagtgccacatcatcaccatatagagatactcaaagtcggacagcctcaccaaacagagcaggaaaaggagtcatagaacagacagaaaaatctcatccaagaagccctaacgtgttatctgtcgctttgagtcaaagaactacagttcctgaggaagaactaaatccaaagatactagctttgcagaatgctcagagaaagcgaaaaatggaacatgatggttcactttttcaagcagtaggaattggaacattattacagcagccagacgatcatgcagctactacatcactttcttggaaacgtgtaaaaggatgcaaatctagtgaacagaatggaatggagcaaaagacaattattttaataccctctgatttagcatgtagactgctggggcaatcaatggatgaaagtggattaccacagctgaccagttatgattgtgaagttaatgctcctatacaaggcagcagaaacctactgcagggtgaagaattactcagagctttggatcaagttaactga

SEQ ID NO: 319 - RNA, 81 nt, synthetic construct; identical to SEQ ID NO: 257
  misc_feature 1..81: note = Homo sapiens__Q16665-1__HIF1alpha(549-575) CDS wt mod
  source 1..81: mol_type = other RNA

SEQ ID NO: 320 - RNA, 45 nt, synthetic construct; identical to SEQ ID NO: 258
  misc_feature 1..45: note = Artificial____Linker CDS wt mod
  source 1..45: mol_type = other RNA

SEQ ID NO: 321 - RNA, 1362 nt, synthetic construct
  misc_feature 1..1362: note = Homo sapiens__Q01196-1__RUNX1(K83E_R174Q) CDS wt mod
  source 1..1362: mol_type = other RNA
atgcgtatccccgtagatgccagcacgagccgccgcttcacgccgccttccaccgcgctgagcccaggcaagatgagcgaggcgttgccgctgggcgccccggacgccggcgctgccctggccggcaagctgaggagcggcgaccgcagcatggtggaggtgctggccgaccacccgggcgagctggtgcgcaccgacagccccaacttcctctgctccgtgctgcctacgcactggcgctgcaacgagaccctgcccatcgctttcaaggtggtggccctaggggatgttccagatggcactctggtcactgtgatggctggcaatgatgaaaactactcggctgagctgagaaatgctaccgcagccatgaagaaccaggttgcaagatttaatgacctcaggtttgtcggtcgaagtggaagagggaaaagtttcactctgaccatcactgtcttcacaaacccaccgcaagtcgccacctaccacagagccatcaaaatcacagtggatgggccccaggaacctcgaagacatcggcagaaactagatgatcagaccaagcccgggagcttgtccttttccgagcggctcagtgaactggagcagctgcggcgcacagccatgagggtcagcccacaccacccagcccccacgcccaaccctcgtgcctccctgaaccactccactgcctttaaccctcagcctcagagtcagatgcaggatacaaggcagatccaaccatccccaccgtggtcctacgatcagtcctaccaatacctgggatccattgcctctccttctgtgcacccagcaacgcccatttcacctggacgtgccagcggcatgacaaccctctctgcagaactttccagtcgactctcaacggcacccgacctgacagcgttcagcgacccgcgccagttccccgcgctgccctccatctccgacccccgcatgcactatccaggcgccttcacctactccccgacgccggtcacctcgggcatcggcatcggcatgtcggccatgggctcggccacgcgctaccacacctacctgccgccgccctaccccggctcgtcgcaagcgcagggaggcccgttccaagccagctcgccctcctaccacctgtactacggcgcctcggccggctcctaccagttctccatggtgggcggcgagcgctcgccgccgcgcatcctgccgccctgcaccaacgcctccaccggctccgcgctgctcaaccccagcctcccgaaccagagcgacgtggtggaggccgagggcagccacagcaactcccccaccaacatggcgccctccgcgcgcctggaggaggccgtgtggaggccctactga

SEQ ID NO: 322 - RNA, 1362 nt, synthetic construct
  misc_feature 1..1362: note = Homo sapiens__Q01196-1__RUNX1 CDS wt mod
  source 1..1362: mol_type = other RNA
atgcgtatccccgtagatgccagcacgagccgccgcttcacgccgccttccaccgcgctgagcccaggcaagatgagcgaggcgttgccgctgggcgccccggacgccggcgctgccctggccggcaagctgaggagcggcgaccgcagcatggtggaggtgctggccgaccacccgggcgagctggtgcgcaccgacagccccaacttcctctgctccgtgctgcctacgcactggcgctgcaacaagaccctgcccatcgctttcaaggtggtggccctaggggatgttccagatggcactctggtcactgtgatggctggcaatgatgaaaactactcggctgagctgagaaatgctaccgcagccatgaagaaccaggttgcaagatttaatgacctcaggtttgtcggtcgaagtggaagagggaaaagtttcactctgaccatcactgtcttcacaaacccaccgcaagtcgccacctaccacagagccatcaaaatcacagtggatgggccccgagaacctcgaagacatcggcagaaactagatgatcagaccaagcccgggagcttgtccttttccgagcggctcagtgaactggagcagctgcggcgcacagccatgagggtcagcccacaccacccagcccccacgcccaaccctcgtgcctccctgaaccactccactgcctttaaccctcagcctcagagtcagatgcaggatacaaggcagatccaaccatccccaccgtggtcctacgatcagtcctaccaatacctgggatccattgcctctccttctgtgcacccagcaacgcccatttcacctggacgtgccagcggcatgacaaccctctctgcagaactttccagtcgactctcaacggcacccgacctgacagcgttcagcgacccgcgccagttccccgcgctgccctccatctccgacccccgcatgcactatccaggcgccttcacctactccccgacgccggtcacctcgggcatcggcatcggcatgtcggccatgggctcggccacgcgctaccacacctacctgccgccgccctaccccggctcgtcgcaagcgcagggaggcccgttccaagccagctcgccctcctaccacctgtactacggcgcctcggccggctcctaccagttctccatggtgggcggcgagcgctcgccgccgcgcatcctgccgccctgcaccaacgcctccaccggctccgcgctgctcaaccccagcctcccgaaccagagcgacgtggtggaggccgagggcagccacagcaactcccccaccaacatggcgccctccgcgcgcctggaggaggccgtgtggaggccctactga

SEQ ID NO: 323 - RNA, 1443 nt, synthetic construct; identical to SEQ ID NO: 261
  misc_feature 1..1443: note = Homo sapiens__Q01196-8__RUNX1 CDS wt mod
  source 1..1443: mol_type = other RNA

SEQ ID NO: 324 - RNA, 1419 nt, synthetic construct; identical to SEQ ID NO: 262
  misc_feature 1..1419: note = Homo sapiens__Q01196-2__RUNX1 CDS wt mod
  source 1..1419: mol_type = other RNA

SEQ ID NO: 325 - RNA, 1419 nt, synthetic construct; identical to SEQ ID NO: 263
  misc_feature 1..1419: note = Homo sapiens__CAA56092.1__RUNX1 CDS wt mod
  source 1..1419: mol_type = other RNA

SEQ ID NO: 326 - RNA, 1407 nt, synthetic construct; identical to SEQ ID NO: 264
  misc_feature 1..1407: note = Homo sapiens__Q01196-10__RUNX1 CDS wt mod
  source 1..1407: mol_type = other RNA

SEQ ID NO: 327 - RNA, 1371 nt, synthetic construct; identical to SEQ ID NO: 265
  misc_feature 1..1371: note = Homo sapiens__Q01196-9__RUNX1 CDS wt mod
  source 1..1371: mol_type = other RNA

SEQ ID NO: 328 - RNA, 1362 nt, synthetic construct; identical to SEQ ID NO: 266
  misc_feature 1..1362: note = Homo sapiens__AAA51720.1__RUNX1 CDS wt mod
  source 1..1362: mol_type = other RNA

SEQ ID NO: 329 - RNA, 1170 nt, synthetic construct; identical to SEQ ID NO: 267
  misc_feature 1..1170: note = Homo sapiens__H9KVB1__RUNX1 CDS wt mod
  source 1..1170: mol_type = other RNA

SEQ ID NO: 330 - RNA, 1047 nt, synthetic construct; identical to SEQ ID NO: 268
  misc_feature 1..1047: note = Homo sapiens__Q01196-11__RUNX1 CDS wt mod
  source 1..1047: mol_type = other RNA

SEQ ID NO: 331 - RNA, 774 nt, synthetic construct; identical to SEQ ID NO: 269
  misc_feature 1..774: note = Homo sapiens__Q01196-4__RUNX1 CDS wt mod
  source 1..774: mol_type = other RNA

SEQ ID NO: 332 - RNA, 771 nt, synthetic construct; identical to SEQ ID NO: 270
  misc_feature 1..771: note = Homo sapiens__A8MZI9__RUNX1 CDS wt mod
  source 1..771: mol_type = other RNA

SEQ ID NO: 333 - RNA, 753 nt, synthetic construct; identical to SEQ ID NO: 271
  misc_feature 1..753: note = Homo sapiens__Q01196-3__RUNX1 CDS wt mod
  source 1..753: mol_type = other RNA

SEQ ID NO: 334 - RNA, 729 nt, synthetic construct; identical to SEQ ID NO: 272
  misc_feature 1..729: note = Homo sapiens__Q01196-7__RUNX1 CDS wt mod
  source 1..729: mol_type = other RNA

SEQ ID NO: 335 - RNA, 675 nt, synthetic construct; identical to SEQ ID NO: 273
  misc_feature 1..675: note = Homo sapiens__Q01196-5__RUNX1 CDS wt mod
  source 1..675: mol_type = other RNA

SEQ ID NO: 336 - RNA, 567 nt, synthetic construct; identical to SEQ ID NO: 274
  misc_feature 1..567: note = Homo sapiens__Q01196-6__RUNX1 CDS wt mod
  source 1..567: mol_type = other RNA

SEQ ID NO: 337 - RNA, 384 nt, synthetic construct; identical to SEQ ID NO: 275
  misc_feature 1..384: note = Homo sapiens__Q01196-1__RUNX1(1-128) CDS wt mod
  source 1..384: mol_type = other RNA

SEQ ID NO: 338 - RNA, 531 nt, synthetic construct
  misc_feature 1..531: note = Homo sapiens__Q01196-1__RUNX1(1-177) CDS wt mod
  source 1..531: mol_type = other RNA
atgcgtatccccgtagatgccagcacgagccgccgcttcacgccgccttccaccgcgctgagcccaggcaagatgagcgaggcgttgccgctgggcgccccggacgccggcgctgccctggccggcaagctgaggagcggcgaccgcagcatggtggaggtgctggccgaccacccgggcgagctggtgcgcaccgacagccccaacttcctctgctccgtgctgcctacgcactggcgctgcaacaagaccctgcccatcgctttcaaggtggtggccctaggggatgttccagatggcactctggtcactgtgatggctggcaatgatgaaaactactcggctgagctgagaaatgctaccgcagccatgaagaaccaggttgcaagatttaatgacctcaggtttgtcggtcgaagtggaagagggaaaagtttcactctgaccatcactgtcttcacaaacccaccgcaagtcgccacctaccacagagccatcaaaatcacagtggatgggccccgagaacctcga

SEQ ID NO: 339 - RNA, 723 nt, synthetic construct
  misc_feature 1..723: note = Homo sapiens__Q01196-1__RUNX1(1-241) CDS wt mod
  source 1..723: mol_type = other RNA
atgcgtatccccgtagatgccagcacgagccgccgcttcacgccgccttccaccgcgctgagcccaggcaagatgagcgaggcgttgccgctgggcgccccggacgccggcgctgccctggccggcaagctgaggagcggcgaccgcagcatggtggaggtgctggccgaccacccgggcgagctggtgcgcaccgacagccccaacttcctctgctccgtgctgcctacgcactggcgctgcaacaagaccctgcccatcgctttcaaggtggtggccctaggggatgttccagatggcactctggtcactgtgatggctggcaatgatgaaaactactcggctgagctgagaaatgctaccgcagccatgaagaaccaggttgcaagatttaatgacctcaggtttgtcggtcgaagtggaagagggaaaagtttcactctgaccatcactgtcttcacaaacccaccgcaagtcgccacctaccacagagccatcaaaatcacagtggatgggccccgagaacctcgaagacatcggcagaaactagatgatcagaccaagcccgggagcttgtccttttccgagcggctcagtgaactggagcagctgcggcgcacagccatgagggtcagcccacaccacccagcccccacgcccaaccctcgtgcctccctgaaccactccactgcctttaaccctcagcctcagagtcagatgcag

SEQ ID NO: 340 - RNA, 1815 nt, synthetic construct
  misc_feature 1..1815: note = Homo sapiens__Q06455-1__RUNX1T1a CDS wt mod
  source 1..1815: mol_type = other RNA
atgatatctgtcaaaagaaacacttggagagcactgagtttagtaataggtgactgccggaagaaagggaactttgaatattgtcaagatcgtactgagaagcactccacaatgccagactcacctgtggatgtgaagacgcaatctaggctgactcctccaacaatgccacctcccccaactactcaaggagctccaagaaccagttcatttacaccgacaacgttaactaatggcacgagccattctcctacagccttgaatggcgccccctcaccacccaatggcttcagcaatgggccttcctcttcttcctcctcctctctggctaatcaacagctgcccccagcctgtggtgccaggcaactcagcaagctgaaaaggttccttactaccctgcagcagtttggcaatgacatttcacccgagataggagaaagagttcgcaccctcgttctgggacttgtgaactccactttgacaattgaagaatttcattccaaactgcaagaagctactaacttcccactgagaccttttgtcatcccatttttgaaggccaacttgcccctgctgcagcgtgagctcctccactgcgcaagactggccaaacagaaccctgcccagtacctcgcccagcatgaacagctgcttctggatgccagcaccacctcacctgttgactcctcagagctgcttctcgatgtgaacgaaaacgggaagaggcgaactccagacagaaccaaagaaaatggctttgacagagagcctttgcactcagaacatccaagcaagcgaccatgcactattagcccaggccagcggtacagtccaaataacggcttatcctaccagcccaatggcctgcctcaccctaccccacctccacctcagcattaccgtttggatgatatggccattgcccaccactacagggactcctatcgacaccccagccacagggacctcagggacagaaacagacctatggggttgcatggcacacgtcaagaagaaatgattgatcacagactaacagacagagaatgggcagaagagtggaaacatcttgaccatctgttaaactgcataatggacatggtagaaaaaacaaggcgatctctcaccgtactaaggcggtgtcaagaagcagaccgggaagaattgaattactggatccggcggtacagtgacgccgaggacttaaaaaaaggtggcggcagtagcagcagccactctaggcagcagagtcccgtcaacccagacccagttgcactagacgcgcatcgggagttccttcacaggcctgcgtctggatacgtgccagaggagatctggaagaaagctgaggaggccgtcaatgaggtgaagcgccaggcgatgacggagctgcagaaggccgtgtctgaggcggagcggaaagcccacgacatgatcacaacagagagggccaagatggagcgcacggtcgccgaggccaaacggcaggcggcggaggacgcactggcagttatcaatcagcaggaggattcaagcgagagttgctggaattgtggccgtaaagcgagtgaaacctgcagtggctgtaacacagcccgatactgtggctcattttgccagcacaaagactgggagaagcaccatcacatctgtggacagaccctgcaggcccagcagcagggagacacacctgcagtcagctcctctgtcacgcccaacagcggggctgggagcccgatggacacaccaccagcagccactccgaggtcaaccaccccgggaaccccttccaccatagagacaacccctcgctga

SEQ ID NO: 341 - RNA, 1992 nt, synthetic construct; identical to SEQ ID NO: 279
  misc_feature 1..1992: note = Homo sapiens__A0A0A0MSU1__RUNX1T1a CDS wt mod
  source 1..1992: mol_type = other RNA

SEQ ID NO: 342 - RNA, 1848 nt, synthetic construct; identical to SEQ ID NO: 280
  misc_feature 1..1848: note = Homo sapiens__Q06455-3__RUNX1T1a CDS wt mod
  source 1..1848: mol_type = other RNA

SEQ ID NO: 343 - RNA, 1755 nt, synthetic construct; identical to SEQ ID NO: 281
  misc_feature 1..1755: note = Homo sapiens__A0A087WWT6__RUNX1T1a CDS wt mod
  source 1..1755: mol_type = other RNA

SEQ ID NO: 344 - RNA, 1734 nt, synthetic construct; identical to SEQ ID NO: 282
  misc_feature 1..1734: note = Homo sapiens__Q06455-2__RUNX1T1a CDS wt mod
  source 1..1734: mol_type = other RNA

SEQ ID NO: 345 - RNA, 1704 nt, synthetic construct; identical to SEQ ID NO: 283
  misc_feature 1..1704: note = Homo sapiens__Q06455-4__RUNX1T1a CDS wt mod
  source 1..1704: mol_type = other RNA

SEQ ID NO: 346 - RNA, 1284 nt, synthetic construct; identical to SEQ ID NO: 284
  misc_feature 1..1284: note = Homo sapiens__Q06455-5__RUNX1T1a CDS wt mod
  source 1..1284: mol_type = other RNA

SEQ ID NO: 347 - RNA, 1203 nt, synthetic construct; identical to SEQ ID NO: 285
  misc_feature 1..1203: note = Homo sapiens__Q06455-6__RUNX1T1a CDS wt mod
  source 1..1203: mol_type = other RNA

SEQ ID NO: 348 - RNA, 1722 nt, synthetic construct
  misc_feature 1..1722: note = Homo sapiens__Q06455-1__RUNX1T1a(31-604) CDS wt mod
  source 1..1722: mol_type = other RNA
cgtactgagaagcactccacaatgccagactcacctgtggatgtgaagacgcaatctaggctgactcctccaacaatgccacctcccccaactactcaaggagctccaagaaccagttcatttacaccgacaacgttaactaatggcacgagccattctcctacagccttgaatggcgccccctcaccacccaatggcttcagcaatgggccttcctcttcttcctcctcctctctggctaatcaacagctgcccccagcctgtggtgccaggcaactcagcaagctgaaaaggttccttactaccctgcagcagtttggcaatgacatttcacccgagataggagaaagagttcgcaccctcgttctgggacttgtgaactccactttgacaattgaagaatttcattccaaactgcaagaagctactaacttcccactgagaccttttgtcatcccatttttgaaggccaacttgcccctgctgcagcgtgagctcctccactgcgcaagactggccaaacagaaccctgcccagtacctcgcccagcatgaacagctgcttctggatgccagcaccacctcacctgttgactcctcagagctgcttctcgatgtgaacgaaaacgggaagaggcgaactccagacagaaccaaagaaaatggctttgacagagagcctttgcactcagaacatccaagcaagcgaccatgcactattagcccaggccagcggtacagtccaaataacggcttatcctaccagcccaatggcctgcctcaccctaccccacctccacctcagcattaccgtttggatgatatggccattgcccaccactacagggactcctatcgacaccccagccacagggacctcagggacagaaacagacctatggggttgcatggcacacgtcaagaagaaatgattgatcacagactaacagacagagaatgggcagaagagtggaaacatcttgaccatctgttaaactgcataatggacatggtagaaaaaacaaggcgatctctcaccgtactaaggcggtgtcaagaagcagaccgggaagaattgaattactggatccggcggtacagtgacgccgaggacttaaaaaaaggtggcggcagtagcagcagccactctaggcagcagagtcccgtcaacccagacccagttgcactagacgcgcatcgggagttccttcacaggcctgcgtctggatacgtgccagaggagatctggaagaaagctgaggaggccgtcaatgaggtgaagcgccaggcgatgacggagctgcagaaggccgtgtctgaggcggagcggaaagcccacgacatgatcacaacagagagggccaagatggagcgcacggtcgccgaggccaaacggcaggcggcggaggacgcactggcagttatcaatcagcaggaggattcaagcgagagttgctggaattgtggccgtaaagcgagtgaaacctgcagtggctgtaacacagcccgatactgtggctcattttgccagcacaaagactgggagaagcaccatcacatctgtggacagaccctgcaggcccagcagcagggagacacacctgcagtcagctcctctgtcacgcccaacagcggggctgggagcccgatggacacaccaccagcagccactccgaggtcaaccaccccgggaaccccttccaccatagagacaacccctcgc

SEQ ID NO: 349 - RNA, 1815 nt, synthetic construct
  misc_feature 1..1815: note = Homo sapiens__O43439-1__RUNX1T1b CDS wt mod
  source 1..1815: mol_type = other RNA
atggctaaagaatctggaattagcttgaaagaaatacaggtcctggcaaggcaatggaaagttggtcctgagaaaagggtgccagcgatgcctggatcgcctgtggaagtgaagatacagtccagatcctcacctcccaccatgccacccctcccaccaataaatcctggaggaccgaggccagtgtccttcactcctactgcattaagcaatggcatcaaccattctcctcctaccctgaatggtgccccatcaccgccacagagattcagcaatggtcctgcctcctccacatcatctgcactcacaaatcagcaattgccagccacttgtggtgctcgacaactcagcaagttgaaacgctttcttaccactctgcaacagtttggcaatgacatctcccctgagattggggagaaggtgcggactcttgttcttgcactggtgaactcaacagtgacaattgaggagttccactgtaagctccaagaagccacaaactttccccttcgtccttttgtgattccatttctcaaggccaacctgcccctgctgcagcgggaactgctgcactgcgctcgggcggccaagcagaccccatcccagtacctggctcagcacgaacaccttctgctcaacacaagcattgcatcgcctgctgactcgtcagagttgctcatggaggtgcacggaaatgggaagaggcccagtccagagaggagagaagagaatagttttgatagagacacaattgctcctgagcctcctgccaagagagtatgtaccatcagccctgctcctcggcacagtcctgctctcactgtgcccctcatgaatcccgggggccaattccatcctacccctccacctcttcagcattacaccttagaggatattgcaacttctcacctgtatcgggaacccaacaagatgctagagcatcgagaagttcgtgatagacaccacagtcttggtctaaatggaggctatcaagatgagttggtagatcatcgtttgacagaaagggaatgggctgatgaatggaaacatcttgaccatgcgctgaattgcattatggaaatggtagagaaaacaaggcgctctatggcagttctgcggcgctgtcaggaatcagatcgtgaagaactcaactactggaaaagacggtacaatgaaaacacagagctgaggaaaacggggaccgagttggtctccaggcagcacagccctgggagtgcagattctctcagcaatgattctcagagagagttcaacagcaggccaggtacaggatacgtacctgtggagttttggaagaaaacagaagaagctgtgaataaggtgaaaattcaggccatgtcagaagtacagaaggccgtcgctgaggcagagcagaaagcctttgaagtgattgcaacagagagagcacgaatggagcaaaccatagcggatgtcaagcggcaggccgcagaggatgctttcctcgtcatcaatgagcaagaggagtccacggagaactgctggaactgtggccgcaaagccagcgagacatgcagtggctgcaatatcgcgcgatactgtggctctttctgccagcacaaggactgggagcggcaccaccgcctctgtggtcagaacctgcatggccagagcccccacggccagggccggccgctgcttcctgtaggcaggggctcctctgccaggtccgccgactgcagcgtgcccagcccagccctcgacaagacctcggcaaccacatcgcgttcctcaacacctgcttctgtgacagctatcgacaccaacggactctga

SEQ ID NO: 350 - RNA, 1845 nt, synthetic construct; identical to SEQ ID NO: 288
  misc_feature 1..1845: note = Homo sapiens__O43439-4__RUNX1T1b CDS wt mod
  source 1..1845: mol_type = other RNA

SEQ ID NO: 351 - RNA, 1788 nt, synthetic construct; identical to SEQ ID NO: 289
  misc_feature 1..1788: note = Homo sapiens__O43439-5__RUNX1T1b CDS wt mod
  source 1..1788: mol_type = other RNA

SEQ ID NO: 352 - RNA, 1728 nt, synthetic construct; identical to SEQ ID NO: 290
  misc_feature 1..1728: note = Homo sapiens__O43439-2__RUNX1T1b CDS wt mod
  source 1..1728: mol_type = other RNA

SEQ ID NO: 353 - RNA, 48 nt, synthetic construct; identical to SEQ ID NO: 291
  misc_feature 1..48: note = Homo sapiens____RUNX1T1b(short) CDS wt mod
  source 1..48: mol_type = other RNA

SEQ ID NO: 354 - RNA, 1749 nt, synthetic construct
  misc_feature 1..1749: note = Homo sapiens__O43439-1__RUNX1T1b(22-604) CDS wt mod
  source 1..1749: mol_type = other RNA
ggtcctgagaaaagggtgccagcgatgcctggatcgcctgtggaagtgaagatacagtccagatcctcacctcccaccatgccacccctcccaccaataaatcctggaggaccgaggccagtgtccttcactcctactgcattaagcaatggcatcaaccattctcctcctaccctgaatggtgccccatcaccgccacagagattcagcaatggtcctgcctcctccacatcatctgcactcacaaatcagcaattgccagccacttgtggtgctcgacaactcagcaagttgaaacgctttcttaccactctgcaacagtttggcaatgacatctcccctgagattggggagaaggtgcggactcttgttcttgcactggtgaactcaacagtgacaattgaggagttccactgtaagctccaagaagccacaaactttccccttcgtccttttgtgattccatttctcaaggccaacctgcccctgctgcagcgggaactgctgcactgcgctcgggcggccaagcagaccccatcccagtacctggctcagcacgaacaccttctgctcaacacaagcattgcatcgcctgctgactcgtcagagttgctcatggaggtgcacggaaatgggaagaggcccagtccagagaggagagaagagaatagttttgatagagacacaattgctcctgagcctcctgccaagagagtatgtaccatcagccctgctcctcggcacagtcctgctctcactgtgcccctcatgaatcccgggggccaattccatcctacccctccacctcttcagcattacaccttagaggatattgcaacttctcacctgtatcgggaacccaacaagatgctagagcatcgagaagttcgtgatagacaccacagtcttggtctaaatggaggctatcaagatgagttggtagatcatcgtttgacagaaagggaatgggctgatgaatggaaacatcttgaccatgcgctgaattgcattatggaaatggtagagaaaacaaggcgctctatggcagttctgcggcgctgtcaggaatcagatcgtgaagaactcaactactggaaaagacggtacaatgaaaacacagagctgaggaaaacggggaccgagttggtctccaggcagcacagccctgggagtgcagattctctcagcaatgattctcagagagagttcaacagcaggccaggtacaggatacgtacctgtggagttttggaagaaaacagaagaagctgtgaataaggtgaaaattcaggccatgtcagaagtacagaaggccgtcgctgaggcagagcagaaagcctttgaagtgattgcaacagagagagcacgaatggagcaaaccatagcggatgtcaagcggcaggccgcagaggatgctttcctcgtcatcaatgagcaagaggagtccacggagaactgctggaactgtggccgcaaagccagcgagacatgcagtggctgcaatatcgcgcgatactgtggctctttctgccagcacaaggactgggagcggcaccaccgcctctgtggtcagaacctgcatggccagagcccccacggccagggccggccgctgcttcctgtaggcaggggctcctctgccaggtccgccgactgcagcgtgcccagcccagccctcgacaagacctcggcaaccacatcgcgttcctcaacacctgcttctgtgacagctatcgacaccaacggactc

SEQ ID NO: 355 - RNA, 1836 nt, synthetic construct
  misc_feature 1..1836: note = Homo sapiens____CBFbeta(1-165)_SMMHC(1527-1972) CDS wt mod
  source 1..1836: mol_type = other RNA
atgccgcgcgtcgtgcccgaccagagaagcaagtttgagaacgaggagttctttaggaagctgagccgcgagtgtgagattaagtacacgggctttagggaccggccccacgaggaacgccaggcacgcttccagaacgcctgccgcgacggccgctcggaaatcgcttttgtggccacaggaaccaatctgtctctccagttctttccggccagctggcagggagaacagcgacaaacacctagccgagagtatgtcgacttagaaagagaagcaggcaaggtatatttgaaggctcccatgattctgaatggagtctgtgttatctggaaaggctggattgatctccaaagactggatggtatgggctgtctggagtttgatgaggagcgagcccagcaggaggatgcattagcacaacaggcctttgaagaggctcggagaaggacacgcgaatttgaagatagagacaggtctcatcgggaggaaatggaggtccatgagctggagaagtccaagcgggccctggagacccagatggaggagatgaagacgcagctggaggaactggaggacgagctgcaagccacggaggacgccaaactgcggctggaagtcaacatgcaggcgctcaagggccagttcgaaagggatctccaagcccgggacgagcagaatgaggagaagaggaggcaactgcagagacagcttcacgagtatgagacggaactggaagacgagcgaaagcaacgtgccctggcagctgcagcaaagaagaagctggaaggggacctgaaagacctggagcttcaggccgactctgccatcaaggggagggaggaagccatcaagcagctacgcaaactgcaggctcagatgaaggactttcaaagagagctggaagatgcccgtgcctccagagatgagatctttgccacagccaaagagaatgagaagaaagccaagagcttggaagcagacctcatgcagctacaagaggacctcgccgccgctgagagggctcgcaaacaagcggacctcgagaaggaggaactggcagaggagctggccagtagcctgtcgggaaggaacgcactccaggacgagaagcgccgcctggaggcccggatcgcccagctggaggaggagctggaggaggagcagggcaacatggaggccatgagcgaccgggtccgcaaagccacacagcaggccgagcagctcagcaacgagctggccacagagcgcagcacggcccagaagaatgagagtgcccggcagcagctcgagcggcagaacaaggagctccggagcaagctccacgagatggagggggccgtcaagtccaagttcaagtccaccatcgcggcgctggaggccaagattgcacagctggaggagcaggtcgagcaggaggccagagagaaacaggcggccaccaagtcgctgaagcagaaagacaagaagctgaaggaaatcttgctccaggtggaggacgagcgcaagatggccgagcagtacaaggagcaggcagagaaaggcaatgccagggtcaagcagctgaagaggcagctggaggaggcagaggaggagtcccagcgcatcaacgccaaccgcaggaagctgcagcgggagctggatgaggccacggagagcaacgaggccatgggccgcgaggtgaacgcactcaagagcaagctcaggcgaggaaacgagacctctttcgttccttctagaaggtctggaggacgtagagttattgaaaatgcagatggttctgaggaggaaacggacactcgagacgcagacttcaatggaaccaaggccagtgaatga

SEQ ID NO: 356 - RNA, 1551 nt, synthetic construct
  misc_feature 1..1551: note = Artificial____CBFbeta(1-165)_SMMHC(1527-1877) CDS wt mod
  source 1..1551: mol_type = other RNA
atgccgcgcgtcgtgcccgaccagagaagcaagtttgagaacgaggagttctttaggaagctgagccgcgagtgtgagattaagtacacgggctttagggaccggccccacgaggaacgccaggcacgcttccagaacgcctgccgcgacggccgctcggaaatcgcttttgtggccacaggaaccaatctgtctctccagttctttccggccagctggcagggagaacagcgacaaacacctagccgagagtatgtcgacttagaaagagaagcaggcaaggtatatttgaaggctcccatgattctgaatggagtctgtgttatctggaaaggctggattgatctccaaagactggatggtatgggctgtctggagtttgatgaggagcgagcccagcaggaggatgcattagcacaacaggcctttgaagaggctcggagaaggacacgcgaatttgaagatagagacaggtctcatcgggaggaaatggaggtccatgagctggagaagtccaagcgggccctggagacccagatggaggagatgaagacgcagctggaggaactggaggacgagctgcaagccacggaggacgccaaactgcggctggaagtcaacatgcaggcgctcaagggccagttcgaaagggatctccaagcccgggacgagcagaatgaggagaagaggaggcaactgcagagacagcttcacgagtatgagacggaactggaagacgagcgaaagcaacgtgccctggcagctgcagcaaagaagaagctggaaggggacctgaaagacctggagcttcaggccgactctgccatcaaggggagggaggaagccatcaagcagctacgcaaactgcaggctcagatgaaggactttcaaagagagctggaagatgcccgtgcctccagagatgagatctttgccacagccaaagagaatgagaagaaagccaagagcttggaagcagacctcatgcagctacaagaggacctcgccgccgctgagagggctcgcaaacaagcggacctcgagaaggaggaactggcagaggagctggccagtagcctgtcgggaaggaacgcactccaggacgagaagcgccgcctggaggcccggatcgcccagctggaggaggagctggaggaggagcagggcaacatggaggccatgagcgaccgggtccgcaaagccacacagcaggccgagcagctcagcaacgagctggccacagagcgcagcacggcccagaagaatgagagtgcccggcagcagctcgagcggcagaacaaggagctccggagcaagctccacgagatggagggggccgtcaagtccaagttcaagtccaccatcgcggcgctggaggccaagattgcacagctggaggagcaggtcgagcaggaggccagagagaaacaggcggccaccaagtcgctgaagcagaaagacaagaagctgaaggaaatcttgctccaggtggaggacgagcgcaagatggccgagcagtacaaggagcaggcagagaaaggcaatgcctga

SEQ ID NO: 357 - RNA, 612 nt, synthetic construct
  misc_feature 1..612: note = Artificial____CBFbeta(1-165)_Linker_Lifeact CDS wt mod
  source 1..612: mol_type = other RNA
atgccgcgcgtcgtgcccgaccagagaagcaagtttgagaacgaggagttctttaggaagctgagccgcgagtgtgagattaagtacacgggctttagggaccggccccacgaggaacgccaggcacgcttccagaacgcctgccgcgacggccgctcggaaatcgcttttgtggccacaggaaccaatctgtctctccagttctttccggccagctggcagggagaacagcgacaaacacctagccgagagtatgtcgacttagaaagagaagcaggcaaggtatatttgaaggctcccatgattctgaatggagtctgtgttatctggaaaggctggattgatctccaaagactggatggtatgggctgtctggagtttgatgaggagcgagcccagcaggaggatgcattagcacaacaggcctttgaagaggctcggagaaggacacgcgaatttgaagatagagacaggtctcatcgggaggaaatggagggcgggagcggcgggtccggcgggagcggcggctccgggggcgggggcgtggccgacctgatcaagaagttcgagagcatctccaaggaggagggggacccgcccgtcgccacctga

SEQ ID NO: 358 - RNA, 579 nt, synthetic construct
  misc_feature 1..579: note = Artificial____CBFbeta(1-165)_HIF1alpha(549-575) CDS wt mod
  source 1..579: mol_type = other RNA
atgccgcgcgtcgtgcccgaccagagaagcaagtttgagaacgaggagttctttaggaagctgagccgcgagtgtgagattaagtacacgggctttagggaccggccccacgaggaacgccaggcacgcttccagaacgcctgccgcgacggccgctcggaaatcgcttttgtggccacaggaaccaatctgtctctccagttctttccggccagctggcagggagaacagcgacaaacacctagccgagagtatgtcgacttagaaagagaagcaggcaaggtatatttgaaggctcccatgattctgaatggagtctgtgttatctggaaaggctggattgatctccaaagactggatggtatgggctgtctggagtttgatgaggagcgagcccagcaggaggatgcattagcacaacaggcctttgaagaggctcggagaaggacacgcgaatttgaagatagagacaggtctcatcgggaggaaatggagccattttctactcaggacacagatttagacttggagatgttagctccctatatcccaatggatgatgacttccagttacgttga

SEQ ID NO: 359 - RNA, 624 nt, synthetic construct
  misc_feature 1..624: note Artificial____CBFbeta(1-165)_Linker_HIF1alpha(549-575) CDS wt mod
  source 1..624: mol_type = other RNA
atgccgcgcgtcgtgcccgaccagagaagcaagtttgagaacgaggagttctttaggaagctgagccgcgagtgtgagattaagtacacgggctttagggaccggccccacgaggaacgccaggcacgcttccagaacgcctgccgcgacggccgctcggaaatcgcttttgtggccacaggaaccaatctgtctctccagttctttccggccagctggcagggagaacagcgacaaacacctagccgagagtatgtcgacttagaaagagaagcaggcaaggtatatttgaaggctcccatgattctgaatggagtctgtgttatctggaaaggctggattgatctccaaagactggatggtatgggctgtctggagtttgatgaggagcgagcccagcaggaggatgcattagcacaacaggcctttgaagaggctcggagaaggacacgcgaatttgaagatagagacaggtctcatcgggaggaaatggagggcgggagcggcgggtccggcgggagcggcggctccgggggcgggccattttctactcaggacacagatttagacttggagatgttagctccctatatcccaatggatgatgacttccagttacgttga

SEQ ID NO: 360 - RNA, 2259 nt, synthetic construct
  misc_feature 1..2259: note = Artificial____RUNX1(1-177)_N_RUNX1T1a(31-604) CDS wt mod
  source 1..2259: mol_type = other RNA
atgcgtatccccgtagatgccagcacgagccgccgcttcacgccgccttccaccgcgctgagcccaggcaagatgagcgaggcgttgccgctgggcgccccggacgccggcgctgccctggccggcaagctgaggagcggcgaccgcagcatggtggaggtgctggccgaccacccgggcgagctggtgcgcaccgacagccccaacttcctctgctccgtgctgcctacgcactggcgctgcaacaagaccctgcccatcgctttcaaggtggtggccctaggggatgttccagatggcactctggtcactgtgatggctggcaatgatgaaaactactcggctgagctgagaaatgctaccgcagccatgaagaaccaggttgcaagatttaatgacctcaggtttgtcggtcgaagtggaagagggaaaagtttcactctgaccatcactgtcttcacaaacccaccgcaagtcgccacctaccacagagccatcaaaatcacagtggatgggccccgagaacctcgaaaccgtactgagaagcactccacaatgccagactcacctgtggatgtgaagacgcaatctaggctgactcctccaacaatgccacctcccccaactactcaaggagctccaagaaccagttcatttacaccgacaacgttaactaatggcacgagccattctcctacagccttgaatggcgccccctcaccacccaatggcttcagcaatgggccttcctcttcttcctcctcctctctggctaatcaacagctgcccccagcctgtggtgccaggcaactcagcaagctgaaaaggttccttactaccctgcagcagtttggcaatgacatttcacccgagataggagaaagagttcgcaccctcgttctgggacttgtgaactccactttgacaattgaagaatttcattccaaactgcaagaagctactaacttcccactgagaccttttgtcatcccatttttgaaggccaacttgcccctgctgcagcgtgagctcctccactgcgcaagactggccaaacagaaccctgcccagtacctcgcccagcatgaacagctgcttctggatgccagcaccacctcacctgttgactcctcagagctgcttctcgatgtgaacgaaaacgggaagaggcgaactccagacagaaccaaagaaaatggctttgacagagagcctttgcactcagaacatccaagcaagcgaccatgcactattagcccaggccagcggtacagtccaaataacggcttatcctaccagcccaatggcctgcctcaccctaccccacctccacctcagcattaccgtttggatgatatggccattgcccaccactacagggactcctatcgacaccccagccacagggacctcagggacagaaacagacctatggggttgcatggcacacgtcaagaagaaatgattgatcacagactaacagacagagaatgggcagaagagtggaaacatcttgaccatctgttaaactgcataatggacatggtagaaaaaacaaggcgatctctcaccgtactaaggcggtgtcaagaagcagaccgggaagaattgaattactggatccggcggtacagtgacgccgaggacttaaaaaaaggtggcggcagtagcagcagccactctaggcagcagagtcccgtcaacccagacccagttgcactagacgcgcatcgggagttccttcacaggcctgcgtctggatacgtgccagaggagatctggaagaaagctgaggaggccgtcaatgaggtgaagcgccaggcgatgacggagctgcagaaggccgtgtctgaggcggagcggaaagcccacgacatgatcacaacagagagggccaagatggagcgcacggtcgccgaggccaaacggcaggcggcggaggacgcactggcagttatcaatcagcaggaggattcaagcgagagttgctggaattgtggccgtaaagcgagtgaaacctgcagtggctgtaacacagcccgatactgtggctcattttgccagcacaaagactgggagaagcaccatcacatctgtggacagaccctgcaggcccagcagcagggagacacacctgcagtcagctcctctgtcacgcccaacagcggggctgggagcccgatggacacaccaccagcagccactccgaggtcaaccaccccgggaaccccttccaccatagagacaacccctcgctga

SEQ ID NO: 361 - RNA, 774 nt, synthetic construct
  misc_feature 1..774: note = Artificial____RUNX1(1-241)_RUNX1T1b(short) CDS wt mod
  source 1..774: mol_type = other RNA
atgcgtatccccgtagatgccagcacgagccgccgcttcacgccgccttccaccgcgctgagcccaggcaagatgagcgaggcgttgccgctgggcgccccggacgccggcgctgccctggccggcaagctgaggagcggcgaccgcagcatggtggaggtgctggccgaccacccgggcgagctggtgcgcaccgacagccccaacttcctctgctccgtgctgcctacgcactggcgctgcaacaagaccctgcccatcgctttcaaggtggtggccctaggggatgttccagatggcactctggtcactgtgatggctggcaatgatgaaaactactcggctgagctgagaaatgctaccgcagccatgaagaaccaggttgcaagatttaatgacctcaggtttgtcggtcgaagtggaagagggaaaagtttcactctgaccatcactgtcttcacaaacccaccgcaagtcgccacctaccacagagccatcaaaatcacagtggatgggccccgagaacctcgaagacatcggcagaaactagatgatcagaccaagcccgggagcttgtccttttccgagcggctcagtgaactggagcagctgcggcgcacagccatgagggtcagcccacaccacccagcccccacgcccaaccctcgtgcctccctgaaccactccactgcctttaaccctcagcctcagagtcagatgcaggaggtgggcttctgccacgtcgcccaggtggggctgaagctcctgggctga

SEQ ID NO: 362 - RNA, 2478 nt, synthetic construct
  misc_feature 1..2478: note = Artificial____RUNX1(1-241)_V_RUNX1T1b(22-604) CDS wt mod
  source 1..2478: mol_type = other RNA
atgcgtatccccgtagatgccagcacgagccgccgcttcacgccgccttccaccgcgctgagcccaggcaagatgagcgaggcgttgccgctgggcgccccggacgccggcgctgccctggccggcaagctgaggagcggcgaccgcagcatggtggaggtgctggccgaccacccgggcgagctggtgcgcaccgacagccccaacttcctctgctccgtgctgcctacgcactggcgctgcaacaagaccctgcccatcgctttcaaggtggtggccctaggggatgttccagatggcactctggtcactgtgatggctggcaatgatgaaaactactcggctgagctgagaaatgctaccgcagccatgaagaaccaggttgcaagatttaatgacctcaggtttgtcggtcgaagtggaagagggaaaagtttcactctgaccatcactgtcttcacaaacccaccgcaagtcgccacctaccacagagccatcaaaatcacagtggatgggccccgagaacctcgaagacatcggcagaaactagatgatcagaccaagcccgggagcttgtccttttccgagcggctcagtgaactggagcagctgcggcgcacagccatgagggtcagcccacaccacccagcccccacgcccaaccctcgtgcctccctgaaccactccactgcctttaaccctcagcctcagagtcagatgcaggtgggtcctgagaaaagggtgccagcgatgcctggatcgcctgtggaagtgaagatacagtccagatcctcacctcccaccatgccacccctcccaccaataaatcctggaggaccgaggccagtgtccttcactcctactgcattaagcaatggcatcaaccattctcctcctaccctgaatggtgccccatcaccgccacagagattcagcaatggtcctgcctcctccacatcatctgcactcacaaatcagcaattgccagccacttgtggtgctcgacaactcagcaagttgaaacgctttcttaccactctgcaacagtttggcaatgacatctcccctgagattggggagaaggtgcggactcttgttcttgcactggtgaactcaacagtgacaattgaggagttccactgtaagctccaagaagccacaaactttccccttcgtccttttgtgattccatttctcaaggccaacctgcccctgctgcagcgggaactgctgcactgcgctcgggcggccaagcagaccccatcccagtacctggctcagcacgaacaccttctgctcaacacaagcattgcatcgcctgctgactcgtcagagttgctcatggaggtgcacggaaatgggaagaggcccagtccagagaggagagaagagaatagttttgatagagacacaattgctcctgagcctcctgccaagagagtatgtaccatcagccctgctcctcggcacagtcctgctctcactgtgcccctcatgaatcccgggggccaattccatcctacccctccacctcttcagcattacaccttagaggatattgcaacttctcacctgtatcgggaacccaacaagatgctagagcatcgagaagttcgtgatagacaccacagtcttggtctaaatggaggctatcaagatgagttggtagatcatcgtttgacagaaagggaatgggctgatgaatggaaacatcttgaccatgcgctgaattgcattatggaaatggtagagaaaacaaggcgctctatggcagttctgcggcgctgtcaggaatcagatcgtgaagaactcaactactggaaaagacggtacaatgaaaacacagagctgaggaaaacggggaccgagttggtctccaggcagcacagccctgggagtgcagattctctcagcaatgattctcagagagagttcaacagcaggccaggtacaggatacgtacctgtggagttttggaagaaaacagaagaagctgtgaataaggtgaaaattcaggccatgtcagaagtacagaaggccgtcgctgaggcagagcagaaagcctttgaagtgattgcaacagagagagcacgaatggagcaaaccatagcggatgtcaagcggcaggccgcagaggatgctttcctcgtcatcaatgagcaagaggagtccacggagaactgctggaactgtggccgcaaagccagcgagacatgcagtggctgcaatatcgcgcgatactgtggctctttctgccagcacaaggactgggagcggcaccaccgcctctgtggtcagaacctgcatggccagagcccccacggccagggccggccgctgcttcctgtaggcaggggctcctctgccaggtccgccgactgcagcgtgcccagcccagccctcgacaagacctcggcaaccacatcgcgttcctcaacacctgcttctgtgacagctatcgacaccaacggactctga

SEQ ID NO: 363 - RNA, 2478 nt, synthetic construct
  misc_feature 1..2478: note = Artificial____RUNX1(1-241)_I_RUNX1T1b(22-604) CDS wt mod
  source 1..2478: mol_type = other RNA
atgcgtatccccgtagatgccagcacgagccgccgcttcacgccgccttccaccgcgctgagcccaggcaagatgagcgaggcgttgccgctgggcgccccggacgccggcgctgccctggccggcaagctgaggagcggcgaccgcagcatggtggaggtgctggccgaccacccgggcgagctggtgcgcaccgacagccccaacttcctctgctccgtgctgcctacgcactggcgctgcaacaagaccctgcccatcgctttcaaggtggtggccctaggggatgttccagatggcactctggtcactgtgatggctggcaatgatgaaaactactcggctgagctgagaaatgctaccgcagccatgaagaaccaggttgcaagatttaatgacctcaggtttgtcggtcgaagtggaagagggaaaagtttcactctgaccatcactgtcttcacaaacccaccgcaagtcgccacctaccacagagccatcaaaatcacagtggatgggccccgagaacctcgaagacatcggcagaaactagatgatcagaccaagcccgggagcttgtccttttccgagcggctcagtgaactggagcagctgcggcgcacagccatgagggtcagcccacaccacccagcccccacgcccaaccctcgtgcctccctgaaccactccactgcctttaaccctcagcctcagagtcagatgcagatcggtcctgagaaaagggtgccagcgatgcctggatcgcctgtggaagtgaagatacagtccagatcctcacctcccaccatgccacccctcccaccaataaatcctggaggaccgaggccagtgtccttcactcctactgcattaagcaatggcatcaaccattctcctcctaccctgaatggtgccccatcaccgccacagagattcagcaatggtcctgcctcctccacatcatctgcactcacaaatcagcaattgccagccacttgtggtgctcgacaactcagcaagttgaaacgctttcttaccactctgcaacagtttggcaatgacatctcccctgagattggggagaaggtgcggactcttgttcttgcactggtgaactcaacagtgacaattgaggagttccactgtaagctccaagaagccacaaactttccccttcgtccttttgtgattccatttctcaaggccaacctgcccctgctgcagcgggaactgctgcactgcgctcgggcggccaagcagaccccatcccagtacctggctcagcacgaacaccttctgctcaacacaagcattgcatcgcctgctgactcgtcagagttgctcatggaggtgcacggaaatgggaagaggcccagtccagagaggagagaagagaatagttttgatagagacacaattgctcctgagcctcctgccaagagagtatgtaccatcagccctgctcctcggcacagtcctgctctcactgtgcccctcatgaatcccgggggccaattccatcctacccctccacctcttcagcattacaccttagaggatattgcaacttctcacctgtatcgggaacccaacaagatgctagagcatcgagaagttcgtgatagacaccacagtcttggtctaaatggaggctatcaagatgagttggtagatcatcgtttgacagaaagggaatgggctgatgaatggaaacatcttgaccatgcgctgaattgcattatggaaatggtagagaaaacaaggcgctctatggcagttctgcggcgctgtcaggaatcagatcgtgaagaactcaactactggaaaagacggtacaatgaaaacacagagctgaggaaaacggggaccgagttggtctccaggcagcacagccctgggagtgcagattctctcagcaatgattctcagagagagttcaacagcaggccaggtacaggatacgtacctgtggagttttggaagaaaacagaagaagctgtgaataaggtgaaaattcaggccatgtcagaagtacagaaggccgtcgctgaggcagagcagaaagcctttgaagtgattgcaacagagagagcacgaatggagcaaaccatagcggatgtcaagcggcaggccgcagaggatgctttcctcgtcatcaatgagcaagaggagtccacggagaactgctggaactgtggccgcaaagccagcgagacatgcagtggctgcaatatcgcgcgatactgtggctctttctgccagcacaaggactgggagcggcaccaccgcctctgtggtcagaacctgcatggccagagcccccacggccagggccggccgctgcttcctgtaggcaggggctcctctgccaggtccgccgactgcagcgtgcccagcccagccctcgacaagacctcggcaaccacatcgcgttcctcaacacctgcttctgtgacagctatcgacaccaacggactctga

SEQ ID NO: 364 - RNA, 549 nt, synthetic construct
  misc_feature 1..549: note = Homo sapiens__Q13951-1__CBFbeta CDS opt1
  source 1..549: mol_type = other RNA
atgccccgcgtggtcccggaccagcggagcaagttcgagaacgaggagttcttccgcaagctgtcccgggagtgcgagatcaagtacaccggcttccgcgaccggccccacgaggagcgccaggcccggttccagaacgcctgccgcgacgggcggagcgagatcgcgttcgtggccaccggcacgaacctctccctgcagttcttccccgccagctggcagggggagcagcgccagaccccctcccgggagtacgtggacctggagcgcgaggccggcaaggtctacctcaaggccccgatgatcctgaacggggtgtgcgtgatctggaagggctggatcgacctgcagcggctcgacggcatggggtgcctggagttcgacgaggagcgcgcgcagcaggaggacgccctggcccagcaggccttcgaggaggcgcggcgccggacccgcgagttcgaggaccgggaccgcagccaccgggaggagatggaggtccgcgtgtcccagctcctggccgtgaccggcaagaagacgacccgcccctga

SEQ ID NO: 365 - RNA, 672 nt, synthetic construct
  misc_feature 1..672: note = Homo sapiens__A0A494C0A9__CBFbeta CDS opt1
  source 1..672: mol_type = other RNA
atgccccgcgtggtccccgaccagcggagcaagttcgagaacgaggagttcttccgcaagctgtcccgggagtgcgagatcaagtacaccggcttccgcgaccggccccacgaggagcgccaggcccggttccagaacgcctgccgcgacgggcggagcgagatcgcgttcgtggccaccggcacgaacctctccctgcagttcttccccgccagctggcagggggagcagcgccagaccccctcccgggagtacgtggacctggagcgcgaggccggcaaggtctacctcaaggcccccatgatcctgaacggggtgtgcgtgatctggaagggctggatcgacctgcagcggctcgacggcatggggtgcctggagttcgacgaggagcgcgcgcagcaggaggacgccctggcccagcaggccttcgaggaggcgcggcgccggacccgcgagttcgaggaccgggaccgcagccaccgggaggagatggaggtccgcgtgtcccagctcctggccgtgaccgagtggcgcagcacgcggaagttctccagcttctggatcccgccgccccgcggctgcttctgcatcgccctgacctcccgggagaacagctcctgctggtgcgtcttcttccgcctcatctggagccacctgatgaccgcctcctga

SEQ ID NO: 366 - RNA, 609 nt, synthetic construct
  misc_feature 1..609: note = Homo sapiens__J3KRT0__CBFbeta CDS opt1
  source 1..609: mol_type = other RNA
atgccccgcgtggtcccggaccagcggagcaagttcgagaacgaggagttcttccgcaagctgtcccgggagtgcgagatcaagtacaccggcttccgcgaccggccccacgaggagcgccaggcccggttccagaacgcctgccgcgacgggcggagcgagatcgtgtcccgcctcgcgcggggcgcccgcgggagcctggtggcccggggccgcgggggccccggccggttccgcaccgccgcccggctgctccgcctgcccgagctgtccgggcggcgcctcacgagctactccggcttcaagatgcggaaccagatgccgcgcgcggggacccgcggcgagaccctgttcctggggctcgccgccgtcgcccgggtgggccagcgcagcaccgcgtccggcgcccggacgcgcgcccggctgaacaagcgccgggccctgttccgccggcgccaccggcgccgggtgcaggggatctgcagcaagcagacccccatccgcaagaagaagtggtccttcatccagggcttctgcgggcaccggaaccagagcgtctcccccgtgttcagcggccagctcgccggccgcaccgcgaccaacacgtga

SEQ ID NO: 367 - RNA, 564 nt, synthetic construct
  misc_feature 1..564: note = Homo sapiens__Q13951-2__CBFbeta CDS opt1
  source 1..564: mol_type = other RNA
atgccccgcgtggtcccggaccagcggagcaagttcgagaacgaggagttcttccgcaagctgtcccgggagtgcgagatcaagtacaccggcttccgcgaccggccccacgaggagcgccaggcccggttccagaacgcctgccgcgacgggcggagcgagatcgcgttcgtggccaccggcacgaacctctccctgcagttcttccccgccagctggcagggggagcagcgccagaccccctcccgggagtacgtggacctggagcgcgaggccggcaaggtctacctcaaggccccgatgatcctgaacggggtgtgcgtgatctggaagggctggatcgacctgcagcggctcgacggcatggggtgcctggagttcgacgaggagcgcgcgcagcaggaggacgccctggcccagcaggccttcgaggaggcgcggcgccggacccgcgagttcgaggaccgggaccgcagccaccgggaggagatggaggcccgccgccagcaggacccctcccccggcagcaacctcgggggcggggacgacctgaagctgcggtga

SEQ ID NO: 368 - RNA, 423 nt, synthetic construct
  misc_feature 1..423: note = Homo sapiens__Q13951-1__CBFbeta(1-141) CDS opt1
  source 1..423: mol_type = other RNA
atgccccgcgtggtcccggaccagcggagcaagttcgagaacgaggagttcttccgcaagctgtcccgggagtgcgagatcaagtacaccggcttccgcgaccggccccacgaggagcgccaggcccggttccagaacgcctgccgcgacgggcggagcgagatcgcgttcgtggccaccggcacgaacctctccctgcagttcttccccgccagctggcagggggagcagcgccagaccccctcccgggagtacgtggacctggagcgcgaggccggcaaggtctacctcaaggccccgatgatcctgaacggggtgtgcgtgatctggaagggctggatcgacctgcagcggctcgacggcatggggtgcctggagttcgacgaggagcgcgcgcagcaggaggacgccctggcccagcag

SEQ ID NO: 369 - RNA, 495 nt, synthetic construct
  misc_feature 1..495: note = Homo sapiens__Q13951-1__CBFbeta(1-165) CDS opt1
  source 1..495: mol_type = other RNA
atgccccgcgtggtcccggaccagcggagcaagttcgagaacgaggagttcttccgcaagctgtcccgggagtgcgagatcaagtacaccggcttccgcgaccggccccacgaggagcgccaggcccggttccagaacgcctgccgcgacgggcggagcgagatcgcgttcgtggccaccggcacgaacctctccctgcagttcttccccgccagctggcagggggagcagcgccagaccccctcccgggagtacgtggacctggagcgcgaggccggcaaggtctacctcaaggccccgatgatcctgaacggggtgtgcgtgatctggaagggctggatcgacctgcagcggctcgacggcatggggtgcctggagttcgacgaggagcgcgcgcagcaggaggacgccctggcccagcaggccttcgaggaggcgcggcgccggacccgcgagttcgaggaccgggaccgcagccaccgggaggagatggag

SEQ ID NO: 370 - RNA, 5919 nt, synthetic construct
  misc_feature 1..5919: note = Homo sapiens__P35749-1__SMMHC CDS opt1
  source 1..5919: mol_type = other RNA
atggcccagaagggccagctgagcgacgacgagaagttcctcttcgtggacaagaacttcatcaactcccccgtcgcccaggcggactgggccgccaagcgcctggtgtgggtgccgagcgagaagcaggggttcgaggccgcctccatcaaggaggagaagggcgacgaggtcgtggtggagctggtcgagaacgggaagaaggtgaccgtgggcaaggacgacatccagaagatgaacccgcccaagttcagcaaggtcgaggacatggcggagctgacctgcctgaacgaggcctccgtgctgcacaacctccgggagcgctacttcagcgggctgatctacacgtactccggcctgttctgcgtggtcgtgaacccctacaagcacctccccatctacagcgagaagatcgtggacatgtacaagggcaagaagcggcacgagatgccgccccacatctacgccatcgccgacaccgcgtaccgctccatgctgcaggaccgggaggaccagagcatcctgtgcaccggggagtccggcgccgggaagaccgagaacacgaagaaggtcatccagtacctcgccgtggtggccagctcccacaagggcaagaaggacaccagcatcaccggggagctggagaagcagctgctccaggccaaccccatcctggaggcgttcggcaacgccaagaccgtcaagaacgacaactccagccgcttcggcaagttcatccggatcaacttcgacgtgacggggtacatcgtgggcgccaacatcgagacctacctgctcgagaagtcccgcgccatccggcaggcccgcgacgagcggaccttccacatcttctactacatgatcgcgggggccaaggagaagatgcgcagcgacctgctgctcgagggcttcaacaactacaccttcctgtccaacggcttcgtccccatccccgccgcccaggacgacgagatgttccaggagacggtggaggccatggcgatcatggggttcagcgaggaggagcagctgagcatcctcaaggtggtctccagcgtgctgcagctgggcaacatcgtcttcaagaaggagcggaacaccgaccaggcctccatgcccgacaacaccgccgcccagaaggtgtgccacctcatggggatcaacgtgaccgacttcacgcgcagcatcctgacgccccggatcaaggtcggccgcgacgtggtgcagaaggcccagaccaaggagcaggcggacttcgccgtcgaggccctggccaaggcgacctacgagcgcctcttccggtggatcctgacccgggtgaacaaggccctggacaagacccaccgccagggggcctccttcctcggcatcctggacatcgccggcttcgagatcttcgaggtgaacagcttcgagcagctgtgcatcaactacaccaacgagaagctccagcagctgttcaaccacaccatgttcatcctggagcaggaggagtaccagcgggaggggatcgagtggaacttcatcgacttcggcctcgacctgcagccgtgcatcgagctgatcgagcgccccaacaacccgcccggggtcctcgccctgctggacgaggagtgctggttccccaaggcgacggacaagtccttcgtggagaagctctgcaccgagcagggcagccaccccaagttccagaagcccaagcagctgaaggacaagaccgagttctccatcatccactacgccgggaaggtggactacaacgccagcgcctggctgaccaagaacatggaccccctgaacgacaacgtcacgtccctcctgaacgccagctccgacaagttcgtggcggacctgtggaaggacgtggaccgcatcgtcggcctcgaccagatggccaagatgaccgagagctccctgccgagcgcctccaagaccaagaagggcatgttccggaccgtggggcagctgtacaaggagcagctcggcaagctgatgacgaccctgcgcaacaccacccccaacttcgtgcggtgcatcatccccaaccacgagaagcgcagcgggaagctcgacgccttcctggtcctggagcagctccggtgcaacggcgtgctggaggggatccgcatctgccggcagggcttccccaaccgcatcgtgttccaggagttccggcagcgctacgagatcctggccgcgaacgccatcccgaagggcttcatggacgggaagcaggcctgcatcctcatgatcaaggccctggagctggaccccaacctctaccggatcggccagtccaagatcttcttccgcacgggggtcctggcgcacctggaggaggagcgggacctcaagatcaccgacgtgatcatggccttccaggccatgtgccgcggctacctggcccggaaggccttcgcgaagcgccagcagcagctgaccgccatgaaggtgatccagcggaactgcgccgcctacctcaagctgcgcaactggcagtggtggcggctgttcaccaaggtcaagcccctcctccaggtgacccgccaggaggaggagatgcaggccaaggaggacgagctgcagaagacgaaggagcgccagcagaaggcggagaacgagctcaaggagctggagcagaagcacagccagctgaccgaggagaagaacctcctgcaggagcagctgcaggccgagaccgagctctacgccgaggccgaggagatgcgggtgcgcctggccgcgaagaagcaggagctggaggagatcctccacgagatggaggcccggctggaggaggaggaggaccgcggccagcagctgcaggccgagcggaagaagatggcccagcagatgctcgacctggaggagcagctggaggaggaggaggcggcccgccagaagctccagctggagaaggtcaccgccgaggccaagatcaagaagctggaggacgagatcctcgtgatggacgaccagaacaacaagctgagcaaggagcggaagctgctcgaggagcgcatctccgacctgacgaccaacctggccgaggaggaggagaaggcgaagaacctcaccaagctgaagaacaagcacgagagcatgatctccgagctggaggtgcggctcaagaaggaggagaagtcccgccaggagctggagaagctgaagcggaagctcgagggggacgccagcgacttccacgagcagatcgccgacctgcaggcccagatcgccgagctgaagatgcagctcgcgaagaaggaggaggagctgcaggccgccctggcccgcctcgacgacgagatcgcccagaagaacaacgcgctgaagaagatccgggagctggagggccacatcagcgacctccaggaggacctggactccgagcgcgccgcccggaacaaggccgagaagcagaagcgcgacctgggggaggagctcgaggccctgaagaccgagctggaggacacgctcgacagcaccgcgacccagcaggagctgcgggccaagcgcgagcaggaggtcaccgtgctgaagaaggccctcgacgaggagacgcggtcccacgaggcccaggtgcaggagatgcgccagaagcacgcgcaggccgtcgaggagctgaccgagcagctggagcagttcaagcgggccaaggccaacctcgacaagaacaagcagaccctggagaaggagaacgccgacctggcgggcgagctccgcgtgctggggcaggccaagcaggaggtggagcacaagaagaagaagctggaggcccaggtccaggagctccagagcaagtgctccgacggcgagcgcgcccgggccgagctgaacgacaaggtgcacaagctgcagaacgaggtggagagcgtcaccggcatgctcaacgaggcggaggggaaggccatcaagctggccaaggacgtggcctccctgagctcccagctccaggacacgcaggagctgctgcaggaggagacccgccagaagctcaacgtgagcaccaagctgcggcagctggaggaggagcgcaactccctgcaggaccagctcgacgaggagatggaggccaagcagaacctggagcggcacatcagcaccctgaacatccagctcagcgactccaagaagaagctgcaggacttcgcgagcacggtcgaggccctggaggagggcaagaagcgcttccagaaggagatcgagaacctcacccagcagtacgaggagaaggccgccgcgtacgacaagctggagaagaccaagaaccggctgcagcaggagctcgacgacctggtggtggacctggacaaccagcgccagctcgtctccaacctggagaagaagcagcggaagttcgaccagctgctcgccgaggagaagaacatcagctccaagtacgccgacgagcgcgaccgggccgaggccgaggcgcgcgagaaggagaccaaggccctgagcctggcccgggccctcgaggaggccctggaggcgaaggaggagctggagcgcacgaacaagatgctcaaggccgagatggaggacctggtgtccagcaaggacgacgtggggaagaacgtgcacgagctggagaagtccaagcgcgccctcgagacccagatggaggagatgaagacccagctggaggagctggaggacgagctccaggccacggaggacgcgaagctgcggctggaggtcaacatgcaggccctcaagggccagttcgagcgcgacctgcaggcccgggacgagcagaacgaggagaagcgccggcagctgcagcgccagctccacgagtacgagaccgagctggaggacgagcggaagcagcgcgccctggccgcggccgccaagaagaagctcgagggggacctgaaggacctggagctccaggccgacagcgcgatcaagggccgggaggaggccatcaagcagctgcgcaagctgcaggcccagatgaaggacttccagcgggagctcgaggacgcccgcgccagccgggacgagatcttcgcgaccgccaaggagaacgagaagaaggccaagtccctggaggccgacctgatgcagctccaggaggacctggccgcggccgagcgcgcccggaagcaggccgacctggagaaggaggagctcgccgaggagctggcgagctccctgagcgggcgcaacgccctccaggacgagaagcggcgcctggaggcccggatcgcccagctggaggaggagctcgaggaggagcagggcaacatggaggccatgtccgaccgcgtgcggaaggcgacccagcaggccgagcagctgagcaacgagctggccacggagcgctccaccgcccagaagaacgagagcgcgcgccagcagctcgagcggcagaacaaggagctgcgctccaagctgcacgagatggagggggccgtgaagtccaagttcaagagcaccatcgccgccctcgaggccaagatcgcgcagctggaggagcaggtcgagcaggaggcccgggagaagcaggccgccaccaagagcctgaagcagaaggacaagaagctcaaggagatcctgctccaggtggaggacgagcgcaagatggccgagcagtacaaggagcaggcggagaagggcaacgcccgggtgaagcagctgaagcgccagctggaggaggccgaggaggagtcccagcggatcaacgccaaccgccggaagctgcagcgcgagctcgacgaggccacggagagcaacgaggcgatgggccgggaggtcaacgccctgaagtccaagctgcgccgggggaacgagaccagcttcgtgccctcccgccggagcggcgggcgccgggtgatcgagaacgccgacggcagcgaggaggagaccgacacccgcgacgccgacttcaacgggacgaaggcgtccgagtga

SEQ ID NO: 371 - RNA, 5940 nt, synthetic construct
  misc_feature 1..5940: note = Homo sapiens__P35749-2__SMMHC CDS opt1
  source 1..5940: mol_type = other RNA
atggcccagaagggccagctgagcgacgacgagaagttcctgttcgtggacaagaacttcatcaactcccccgtcgcccaggcggactgggccgccaagcgcctggtgtgggtgccgagcgagaagcaggggttcgaggccgcctccatcaaggaggagaagggcgacgaggtcgtggtggagctggtcgagaacgggaagaaggtgaccgtgggcaaggacgacatccagaagatgaacccgcccaagttcagcaaggtcgaggacatggcggagctgacctgcctgaacgaggcctccgtgctgcacaacctccgggagcgctacttcagcgggctgatctacacgtactccggcctgttctgcgtggtcgtgaacccctacaagcacctccccatctacagcgagaagatcgtggacatgtacaagggcaagaagcggcacgagatgccgccccacatctacgccatcgccgacaccgcgtaccgctccatgctgcaggaccgggaggaccagagcatcctgtgcaccggggagtccggcgccgggaagaccgagaacacgaagaaggtcatccagtacctcgccgtggtggccagctcccacaagggcaagaaggacaccagcatcacccaggggccctccttcgcctacggcgagctggagaagcagctgctccaggcgaaccccatcctggaggccttcggcaacgccaagaccgtcaagaacgacaacagctcccgcttcgggaagttcatccggatcaacttcgacgtgacgggctacatcgtgggggccaacatcgagacctacctgctcgagaagtcccgcgccatccggcaggcgcgcgacgagcggaccttccacatcttctactacatgatcgccggcgccaaggagaagatgcgcagcgacctgctgctcgagggcttcaacaactacaccttcctgagcaacgggttcgtccccatccccgccgcccaggacgacgagatgttccaggagacggtggaggcgatggccatcatgggcttcagcgaggaggagcagctgtccatcctcaaggtggtcagctccgtgctgcagctggggaacatcgtcttcaagaaggagcggaacaccgaccaggccagcatgcccgacaacaccgccgcccagaaggtgtgccacctcatgggcatcaacgtgaccgacttcacgcgctccatcctgaccccgcggatcaaggtcgggcgcgacgtggtgcagaaggcgcagaccaaggagcaggccgacttcgccgtcgaggccctggcgaaggccacctacgagcgcctcttccggtggatcctgacgcgggtgaacaaggccctggacaagacccaccgccagggcgccagcttcctcggcatcctggacatcgccgggttcgagatcttcgaggtgaactccttcgagcagctgtgcatcaactacaccaacgagaagctccagcagctgttcaaccacaccatgttcatcctggagcaggaggagtaccagcgggagggcatcgagtggaacttcatcgacttcgggctcgacctgcagccctgcatcgagctgatcgagcgccccaacaacccgcccggcgtcctcgcgctgctggacgaggagtgctggttccccaaggccacggacaagagcttcgtggagaagctctgcaccgagcaggggtcccaccccaagttccagaagcccaagcagctgaaggacaagaccgagttcagcatcatccactacgccggcaaggtggactacaacgcctccgcctggctgaccaagaacatggacccgctgaacgacaacgtcacgagcctcctgaacgcgtccagcgacaagttcgtggccgacctgtggaaggacgtggaccgcatcgtcggcctcgaccagatggccaagatgaccgagtccagcctgccctccgccagcaagaccaagaaggggatgttccggaccgtgggccagctgtacaaggagcagctcgggaagctgatgacgaccctgcgcaacaccacccccaacttcgtgcggtgcatcatccccaaccacgagaagcgctccggcaagctcgacgccttcctggtcctggagcagctccggtgcaacggggtgctggagggcatccgcatctgccggcagggcttcccgaaccgcatcgtgttccaggagttccggcagcgctacgagatcctggcggccaacgccatccccaaggggttcatggacggcaagcaggcctgcatcctcatgatcaaggcgctggagctggaccccaacctctaccggatcgggcagagcaagatcttcttccgcacgggcgtcctggcccacctggaggaggagcgggacctcaagatcaccgacgtgatcatggccttccaggccatgtgccgcggctacctggcccggaaggcgttcgccaagcgccagcagcagctgaccgccatgaaggtgatccagcggaactgcgccgcctacctcaagctgcgcaactggcagtggtggcggctgttcaccaaggtcaagcccctcctccaggtgacccgccaggaggaggagatgcaggcgaaggaggacgagctgcagaagacgaaggagcgccagcagaaggccgagaacgagctcaaggagctggagcagaagcacagccagctgaccgaggagaagaacctcctgcaggagcagctgcaggccgagaccgagctctacgccgaggccgaggagatgcgggtgcgcctggcggccaagaagcaggagctggaggagatcctccacgagatggaggcccggctggaggaggaggaggaccgcgggcagcagctgcaggccgagcggaagaagatggcgcagcagatgctcgacctggaggagcagctggaggaggaggaggccgcccgccagaagctccagctggagaaggtcaccgccgaggccaagatcaagaagctggaggacgagatcctcgtgatggacgaccagaacaacaagctgtccaaggagcggaagctgctcgaggagcgcatcagcgacctgacgaccaacctggcggaggaggaggagaaggccaagaacctcaccaagctgaagaacaagcacgagtccatgatcagcgagctggaggtgcggctcaagaaggaggagaagtcccgccaggagctggagaagctgaagcggaagctcgagggcgacgccagcgacttccacgagcagatcgccgacctgcaggcccagatcgcggagctgaagatgcagctcgccaagaaggaggaggagctgcaggccgccctggcccgcctcgacgacgagatcgcgcagaagaacaacgccctgaagaagatccgggagctggaggggcacatctccgacctccaggaggacctggacagcgagcgcgccgcccggaacaaggccgagaagcagaagcgcgacctgggcgaggagctcgaggcgctgaagaccgagctggaggacacgctcgactccaccgccacccagcaggagctgcgggccaagcgcgagcaggaggtcaccgtgctgaagaaggccctcgacgaggagacgcggagccacgaggcccaggtgcaggagatgcgccagaagcacgcgcaggccgtcgaggagctgaccgagcagctggagcagttcaagcgggccaaggccaacctcgacaagaacaagcagaccctggagaaggagaacgcggacctggccggggagctccgcgtgctgggccaggccaagcaggaggtggagcacaagaagaagaagctggaggcccaggtccaggagctccagtccaagtgcagcgacggcgagcgcgcccgggcggagctgaacgacaaggtgcacaagctgcagaacgaggtggagtccgtcaccgggatgctcaacgaggccgagggcaaggccatcaagctggccaaggacgtggccagcctgtccagccagctccaggacacgcaggagctgctgcaggaggagacccgccagaagctcaacgtgtccaccaagctgcggcagctggaggaggagcgcaacagcctgcaggaccagctcgacgaggagatggaggcgaagcagaacctggagcggcacatcagcaccctgaacatccagctctccgacagcaagaagaagctgcaggacttcgcctccacggtcgaggccctggaggaggggaagaagcgcttccagaaggagatcgagaacctcacccagcagtacgaggagaaggccgcggcctacgacaagctggagaagaccaagaaccggctgcagcaggagctcgacgacctggtggtggacctggacaaccagcgccagctcgtcagcaacctggagaagaagcagcggaagttcgaccagctgctcgccgaggagaagaacatctccagcaagtacgccgacgagcgcgaccgggccgaggcggaggcccgcgagaaggagaccaaggccctgtccctggcccgggccctcgaggaggcgctggaggccaaggaggagctggagcgcacgaacaagatgctcaaggccgagatggaggacctggtgagctccaaggacgacgtgggcaagaacgtccacgagctggagaagtccaagcgggccctcgagacccagatggaggagatgaagacccagctggaggagctggaggacgagctccaggccaccgaggacgcgaagctgcgcctggaggtgaacatgcaggccctcaaggggcagttcgagcgggacctgcaggcccgcgacgagcagaacgaggagaagcggcgccagctgcagcgccagctccacgagtacgagacggagctggaggacgagcggaagcagcgcgccctggcggccgccgccaagaagaagctcgagggcgacctgaaggacctggagctccaggccgacagcgcgatcaagggccgggaggaggccatcaagcagctgcgcaagctgcaggcccagatgaaggacttccagcgggagctcgaggacgcccgcgccagccgggacgagatcttcgcgaccgccaaggagaacgagaagaaggccaagtccctggaggccgacctgatgcagctccaggaggacctggccgcggccgagcgcgcccggaagcaggccgacctggagaaggaggagctcgccgaggagctggcgagctccctgagcgggcgcaacgccctccaggacgagaagcggcgcctggaggcccggatcgcccagctggaggaggagctcgaggaggagcagggcaacatggaggcgatgtccgaccgcgtgcggaaggccacccagcaggccgagcagctgagcaacgagctggccaccgagcgctccacggcccagaagaacgagagcgcgcggcagcagctcgagcgccagaacaaggagctgcggagcaagctgcacgagatggagggggccgtcaagtccaagttcaagagcaccatcgccgccctcgaggccaagatcgcgcagctggaggagcaggtcgagcaggaggcccgcgagaagcaggccgccaccaagtccctgaagcagaaggacaagaagctcaaggagatcctgctccaggtggaggacgagcggaagatggccgagcagtacaaggagcaggcggagaagggcaacgcccgcgtgaagcagctgaagcgccagctggaggaggccgaggaggagagccagcggatcaacgccaaccgccggaagctgcagcgcgagctcgacgaggcgaccgagtccaacgaggccatggggcgggaggtgaacgccctcaagagcaagctgcgccggggcaacgagacgtccttcgtcccgagccgccggtccggcgggcgccgggtgatcgagaacgccgacggcagcgaggaggagaccgacacccgcgacgccgacttcaacgggaccaaggcgtccgagtga

SEQ ID NO: 372 - RNA, 5838 nt, synthetic construct
  misc_feature 1..5838: note = Homo sapiens__P35749-3__SMMHC CDS opt1
  source 1..5838: mol_type = other RNA
atggcccagaagggccagctgagcgacgacgagaagttcctcttcgtggacaagaacttcatcaactcccccgtcgcccaggcggactgggccgccaagcgcctggtgtgggtgcccagcgagaagcaggggttcgaggccgcctccatcaaggaggagaagggcgacgaggtcgtggtggagctggtcgagaacgggaagaaggtgaccgtgggcaaggacgacatccagaagatgaacccgcccaagttcagcaaggtcgaggacatggcggagctcacgtgcctgaacgaggcctccgtgctgcacaacctccgggagcgctacttcagcgggctgatctacacgtactccggcctgttctgcgtggtcgtgaacccctacaagcacctccccatctacagcgagaagatcgtggacatgtacaagggcaagaagcggcacgagatgccgccccacatctacgccatcgccgacaccgcgtaccgctccatgctgcaggaccgggaggaccagagcatcctgtgcaccggggagtccggcgccgggaagaccgagaacacgaagaaggtcatccagtacctcgccgtggtggccagctcccacaagggcaagaaggacaccagcatcacccaggggccctccttcgcctacggcgagctggagaagcagctgctccaggcgaaccccatcctggaggccttcggcaacgccaagaccgtcaagaacgacaacagctcccgcttcgggaagttcatccggatcaacttcgacgtgacgggctacatcgtgggggccaacatcgagacctacctgctcgagaagtcccgcgccatccggcaggcgcgcgacgagcggaccttccacatcttctactacatgatcgccggcgccaaggagaagatgcgctccgacctgctgctcgagggcttcaacaactacaccttcctgagcaacgggttcgtccccatccccgccgcccaggacgacgagatgttccaggagacggtggaggcgatggccatcatgggcttcagcgaggaggagcagctgtccatcctcaaggtggtcagctccgtgctgcagctggggaacatcgtcttcaagaaggagcggaacaccgaccaggccagcatgcccgacaacaccgccgcccagaaggtgtgccacctcatgggcatcaacgtgaccgacttcacgcgctccatcctgaccccgcggatcaaggtcgggcgcgacgtggtgcagaaggcgcagaccaaggagcaggccgacttcgccgtcgaggccctggcgaaggccacctacgagcgcctcttccgctggatcctgacgcgggtgaacaaggccctggacaagacccaccgccagggcgccagcttcctcggcatcctggacatcgccgggttcgagatcttcgaggtgaactccttcgagcagctgtgcatcaactacaccaacgagaagctccagcagctgttcaaccacaccatgttcatcctggagcaggaggagtaccagcgggagggcatcgagtggaacttcatcgacttcgggctcgacctgcagccctgcatcgagctgatcgagcgccccaacaacccgcccggcgtcctcgcgctgctggacgaggagtgctggttccccaaggccacggacaagagcttcgtggagaagctctgcaccgagcaggggtcccaccccaagttccagaagcccaagcagctgaaggacaagaccgagttcagcatcatccactacgccggcaaggtggactacaacgcctccgcctggctgaccaagaacatggacccgctgaacgacaacgtcacgagcctcctgaacgcgtccagcgacaagttcgtggccgacctgtggaaggacgtggaccgcatcgtcggcctcgaccagatggccaagatgaccgagtccagcctgccctccgccagcaagaccaagaaggggatgttccggaccgtgggccagctgtacaaggagcagctggggaagctgatgaccaccctgcggaacaccacccccaacttcgtgcggtgcatcatccccaaccacgagaagcgcagcggcaagctcgacgccttcctggtcctggagcagctccggtgcaacggggtgctggagggcatccgcatctgccggcagggcttcccgaaccgcatcgtgttccaggagttccggcagcgctacgagatcctggcggccaacgccatccccaaggggttcatggacggcaagcaggcctgcatcctcatgatcaaggcgctggagctggaccccaacctctaccggatcgggcagagcaagatcttcttccgcacgggcgtcctggcccacctggaggaggagcgggacctcaagatcaccgacgtgatcatggccttccaggccatgtgccgcggctacctggcccggaaggcgttcgccaagcgccagcagcagctgaccgccatgaaggtgatccagcggaactgcgccgcctacctcaagctgcgcaactggcagtggtggcggctgttcaccaaggtcaagcccctcctccaggtgacccgccaggaggaggagatgcaggcgaaggaggacgagctgcagaagacgaaggagcgccagcagaaggccgagaacgagctgaaggagctggagcagaagcacagccagctgaccgaggagaagaacctcctgcaggagcagctgcaggccgagaccgagctctacgccgaggccgaggagatgcgggtgcgcctggcggccaagaagcaggagctggaggagatcctccacgagatggaggcccggctggaggaggaggaggaccgcgggcagcagctgcaggccgagcggaagaagatggcgcagcagatgctcgacctggaggagcagctggaggaggaggaggccgcccgccagaagctccagctggagaaggtcaccgccgaggccaagatcaagaagctggaggacgagatcctcgtgatggacgaccagaacaacaagctgtccaaggagcggaagctgctcgaggagcgcatcagcgacctgacgaccaacctggcggaggaggaggagaaggccaagaacctcaccaagctgaagaacaagcacgagtccatgatcagcgagctggaggtgcggctcaagaaggaggagaagtcccgccaggagctggagaagctgaagcggaagctcgagggcgacgccagcgacttccacgagcagatcgccgacctgcaggcccagatcgcggagctgaagatgcagctcgccaagaaggaggaggagctgcaggccgccctggcccgcctcgacgacgagatcgcgcagaagaacaacgccctgaagaagatccgggagctggaggggcacatctccgacctccaggaggacctggacagcgagcgcgccgcccggaacaaggccgagaagcagaagcgcgacctgggcgaggagctcgaggcgctgaagaccgagctggaggacacgctcgactccaccgccacccagcaggagctgcgggccaagcgcgagcaggaggtcaccgtgctgaagaaggccctcgacgaggagacgcggagccacgaggcccaggtgcaggagatgcgccagaagcacgcgcaggccgtcgaggagctgaccgagcagctggagcagttcaagcgggccaaggccaacctcgacaagaacaagcagaccctggagaaggagaacgcggacctggccggggagctccgcgtgctgggccaggccaagcaggaggtggagcacaagaagaagaagctggaggcccaggtccaggagctccagtccaagtgcagcgacggcgagcgcgcccgggcggagctgaacgacaaggtgcacaagctgcagaacgaggtggagtccgtcaccgggatgctcaacgaggccgagggcaaggccatcaagctggccaaggacgtggccagcctgtccagccagctccaggacacgcaggagctgctgcaggaggagacccgccagaagctcaacgtgtccaccaagctgcggcagctggaggaggagcgcaacagcctgcaggaccagctcgacgaggagatggaggcgaagcagaacctggagcggcacatcagcaccctgaacatccagctctccgacagcaagaagaagctgcaggacttcgcctccacggtcgaggccctggaggaggggaagaagcgcttccagaaggagatcgagaacctcacccagcagtacgaggagaaggccgcggcctacgacaagctggagaagaccaagaaccggctgcagcaggagctcgacgacctggtggtggacctggacaaccagcgccagctcgtcagcaacctggagaagaagcagcggaagttcgaccagctgctcgccgaggagaagaacatctccagcaagtacgccgacgagcgcgaccgggccgaggcggaggcccgcgagaaggagaccaaggccctgtccctggcccgggccctcgaggaggcgctggaggccaaggaggagctggagcgcacgaacaagatgctcaaggccgagatggaggacctggtgagctccaaggacgacgtgggcaagaacgtccacgagctggagaagtccaagcgggccctcgagacccagatggaggagatgaagacccagctggaggagctggaggacgagctccaggccaccgaggacgcgaagctgcgcctggaggtgaacatgcaggccctcaaggggcagttcgagcgggacctgcaggcccgcgacgagcagaacgaggagaagcggcgccagctgcagcgccagctccacgagtacgagacggagctggaggacgagcggaagcagcgcgccctggcggccgccgccaagaagaagctcgagggcgacctgaaggacctggagctccaggccgacagcgcgatcaagggccgggaggaggccatcaagcagctgcgcaagctgcaggcccagatgaaggacttccagcgggagctcgaggacgcccgcgccagccgggacgagatcttcgcgaccgccaaggagaacgagaagaaggccaagtccctggaggccgacctgatgcagctccaggaggacctggccgcggccgagcgcgcccggaagcaggccgacctggagaaggaggagctcgccgaggagctggcgagctccctgagcgggcgcaacgccctccaggacgagaagcggcgcctggaggcccggatcgcccagctggaggaggagctcgaggaggagcagggcaacatggaggcgatgtccgaccgcgtgcggaaggccacccagcaggccgagcagctgagcaacgagctggccaccgagcgctccacggcccagaagaacgagagcgcgcggcagcagctcgagcgccagaacaaggagctgcggagcaagctgcacgagatggagggggccgtcaagtccaagttcaagagcaccatcgccgccctcgaggccaagatcgcgcagctggaggagcaggtcgagcaggaggcccgcgagaagcaggccgccaccaagtccctgaagcagaaggacaagaagctcaaggagatcctgctccaggtggaggacgagcggaagatggccgagcagtacaaggagcaggcggagaagggcaacgcccgcgtgaagcagctgaagcgccagctggaggaggccgaggaggagagccagcggatcaacgccaaccgccggaagctgcagcgcgagctcgacgaggcgaccgagtccaacgaggccatggggcgggaggtgaacgccctcaagagcaagctgcgcggcccgccgccccaggagacgtcccagtga

SEQ ID NO: 373 - RNA, 5817 nt, synthetic construct
  misc_feature 1..5817: note = Homo sapiens__P35749-4__SMMHC CDS opt1
  source 1..5817: mol_type = other RNA
atggcccagaagggccagctgagcgacgacgagaagttcctcttcgtggacaagaacttcatcaactcccccgtcgcccaggcggactgggccgccaagcgcctggtgtgggtgccgagcgagaagcaggggttcgaggccgcctccatcaaggaggagaagggcgacgaggtcgtggtggagctggtcgagaacgggaagaaggtgaccgtgggcaaggacgacatccagaagatgaacccgcccaagttcagcaaggtcgaggacatggcggagctgacctgcctgaacgaggcctccgtgctgcacaacctccgggagcgctacttcagcgggctgatctacacgtactccggcctgttctgcgtggtcgtgaacccctacaagcacctccccatctacagcgagaagatcgtggacatgtacaagggcaagaagcggcacgagatgccgccccacatctacgccatcgccgacaccgcgtaccgctccatgctgcaggaccgggaggaccagagcatcctgtgcaccggggagtccggcgccgggaagaccgagaacacgaagaaggtcatccagtacctcgccgtggtggccagctcccacaagggcaagaaggacaccagcatcaccggggagctggagaagcagctgctccaggccaaccccatcctggaggcgttcggcaacgccaagaccgtcaagaacgacaactccagccgcttcggcaagttcatccggatcaacttcgacgtgacggggtacatcgtgggcgccaacatcgagacctacctgctcgagaagtcccgcgccatccggcaggcccgcgacgagcggaccttccacatcttctactacatgatcgcgggggccaaggagaagatgcgcagcgacctgctgctcgagggcttcaacaactacaccttcctgtccaacggcttcgtccccatccccgccgcccaggacgacgagatgttccaggagacggtggaggccatggcgatcatggggttcagcgaggaggagcagctgagcatcctcaaggtggtctccagcgtgctgcagctgggcaacatcgtcttcaagaaggagcggaacaccgaccaggcctccatgcccgacaacaccgccgcccagaaggtgtgccacctcatggggatcaacgtgaccgacttcacgcgcagcatcctgacgccccggatcaaggtcggccgcgacgtggtgcagaaggcccagaccaaggagcaggcggacttcgccgtcgaggccctggccaaggcgacctacgagcgcctcttccggtggatcctgacccgggtgaacaaggccctggacaagacccaccgccagggggcctccttcctcggcatcctggacatcgccggcttcgagatcttcgaggtgaacagcttcgagcagctgtgcatcaactacaccaacgagaagctccagcagctgttcaaccacaccatgttcatcctggagcaggaggagtaccagcgggaggggatcgagtggaacttcatcgacttcggcctcgacctgcagccgtgcatcgagctgatcgagcgccccaacaacccgcccggggtcctcgccctgctggacgaggagtgctggttccccaaggcgacggacaagtccttcgtggagaagctctgcaccgagcagggcagccaccccaagttccagaagcccaagcagctgaaggacaagaccgagttctccatcatccactacgccgggaaggtggactacaacgccagcgcctggctgaccaagaacatggaccccctgaacgacaacgtcacgtccctcctgaacgccagctccgacaagttcgtggcggacctgtggaaggacgtggaccgcatcgtcggcctcgaccagatggccaagatgaccgagagctccctgccgagcgcctccaagaccaagaagggcatgttccggaccgtggggcagctgtacaaggagcagctcggcaagctgatgacgaccctgcgcaacaccacccccaacttcgtgcggtgcatcatccccaaccacgagaagcgcagcgggaagctcgacgccttcctggtcctggagcagctccggtgcaacggcgtgctggaggggatccgcatctgccggcagggcttccccaaccgcatcgtgttccaggagttccggcagcgctacgagatcctggccgcgaacgccatcccgaagggcttcatggacgggaagcaggcctgcatcctcatgatcaaggccctggagctggaccccaacctctaccggatcggccagtccaagatcttcttccgcacgggggtcctggcgcacctggaggaggagcgggacctcaagatcaccgacgtgatcatggccttccaggccatgtgccgcggctacctggcccggaaggccttcgcgaagcgccagcagcagctgaccgccatgaaggtgatccagcggaactgcgccgcctacctcaagctgcgcaactggcagtggtggcggctgttcaccaaggtcaagcccctcctccaggtgacccgccaggaggaggagatgcaggccaaggaggacgagctgcagaagacgaaggagcgccagcagaaggcggagaacgagctcaaggagctggagcagaagcacagccagctgaccgaggagaagaacctcctgcaggagcagctgcaggccgagaccgagctctacgccgaggccgaggagatgcgggtgcgcctggccgcgaagaagcaggagctggaggagatcctccacgagatggaggcccggctggaggaggaggaggaccgcggccagcagctgcaggccgagcggaagaagatggcccagcagatgctcgacctggaggagcagctggaggaggaggaggcggcccgccagaagctccagctggagaaggtcaccgccgaggccaagatcaagaagctggaggacgagatcctcgtgatggacgaccagaacaacaagctgagcaaggagcggaagctgctcgaggagcgcatctccgacctgacgaccaacctggccgaggaggaggagaaggcgaagaacctcaccaagctgaagaacaagcacgagagcatgatctccgagctggaggtgcggctcaagaaggaggagaagtcccgccaggagctggagaagctgaagcggaagctcgagggggacgccagcgacttccacgagcagatcgccgacctgcaggcccagatcgccgagctgaagatgcagctcgcgaagaaggaggaggagctgcaggccgccctggcccgcctcgacgacgagatcgcccagaagaacaacgcgctgaagaagatccgggagctggagggccacatcagcgacctccaggaggacctggactccgagcgcgccgcccggaacaaggccgagaagcagaagcgcgacctgggggaggagctcgaggccctgaagaccgagctggaggacacgctcgacagcaccgcgacccagcaggagctgcgggccaagcgcgagcaggaggtcaccgtgctgaagaaggccctcgacgaggagacgcggtcccacgaggcccaggtgcaggagatgcgccagaagcacgcgcaggccgtcgaggagctgaccgagcagctggagcagttcaagcgggccaaggccaacctcgacaagaacaagcagaccctggagaaggagaacgccgacctggcgggcgagctccgcgtgctggggcaggccaagcaggaggtggagcacaagaagaagaagctggaggcccaggtccaggagctccagagcaagtgctccgacggcgagcgcgcccgggccgagctgaacgacaaggtgcacaagctgcagaacgaggtggagagcgtcaccggcatgctcaacgaggcggaggggaaggccatcaagctggccaaggacgtggcctccctgagctcccagctccaggacacgcaggagctgctgcaggaggagacccgccagaagctcaacgtgagcaccaagctgcggcagctggaggaggagcgcaactccctgcaggaccagctcgacgaggagatggaggccaagcagaacctggagcggcacatcagcaccctgaacatccagctcagcgactccaagaagaagctgcaggacttcgcgagcacggtcgaggccctggaggagggcaagaagcgcttccagaaggagatcgagaacctcacccagcagtacgaggagaaggccgccgcgtacgacaagctggagaagaccaagaaccggctgcagcaggagctcgacgacctggtggtggacctggacaaccagcgccagctcgtctccaacctggagaagaagcagcggaagttcgaccagctgctcgccgaggagaagaacatcagctccaagtacgccgacgagcgcgaccgggccgaggccgaggcgcgcgagaaggagaccaaggccctgagcctggcccgggccctcgaggaggccctggaggcgaaggaggagctggagcgcacgaacaagatgctcaaggccgagatggaggacctggtgtccagcaaggacgacgtggggaagaacgtccacgagctggagaagtccaagcgggccctcgagacccagatggaggagatgaagacccagctggaggagctggaggacgagctccaggccaccgaggacgccaagctgcgcctggaggtgaacatgcaggcgctcaagggccagttcgagcgggacctgcaggcccgcgacgagcagaacgaggagaagcggcgccagctgcagcgccagctccacgagtacgagacggagctggaggacgagcggaagcagcgcgccctggccgcggccgccaagaagaagctcgagggggacctgaaggacctggagctccaggccgacagcgccatcaagggccgggaggaggcgatcaagcagctgcgcaagctgcaggcccagatgaaggacttccagcgggagctcgaggacgcccgcgcctcccgggacgagatcttcgccaccgcgaaggagaacgagaagaaggccaagagcctggaggccgacctgatgcagctccaggaggacctggccgccgcggagcgcgcccggaagcaggccgacctggagaaggaggagctcgccgaggagctggcctccagcctgtccggccgcaacgcgctccaggacgagaagcggcgcctggaggcccggatcgcccagctggaggaggagctcgaggaggagcaggggaacatggaggccatgagcgaccgcgtgcggaaggcgacccagcaggccgagcagctgtccaacgagctggccaccgagcgcagcacggcccagaagaacgagtccgcccggcagcagctcgagcgccagaacaaggagctgcggagcaagctgcacgagatggagggcgcggtcaagagcaagttcaagtccaccatcgccgccctcgaggccaagatcgcccagctggaggagcaggtcgagcaggaggcgcgcgagaagcaggccgccaccaagagcctgaagcagaaggacaagaagctcaaggagatcctgctccaggtggaggacgagcggaagatggccgagcagtacaaggagcaggccgagaaggggaacgcgcgcgtgaagcagctgaagcgccagctggaggaggccgaggaggagtcccagcggatcaacgccaaccgccggaagctgcagcgcgagctcgacgaggccaccgagagcaacgaggcgatgggccgggaggtgaacgccctgaagtccaagctgcgcgggcccccgccccaggagacgagccagtga

SEQ ID NO: 374 - RNA, 1338 nt, synthetic construct
  misc_feature 1..1338: note = Homo sapiens__P35749-1__SMMHC(1527-1972) CDS opt1
  source 1..1338: mol_type = other RNA
gtgcacgagctggagaagtccaagcgcgccctcgagacccagatggaggagatgaagacccagctggaggagctggaggacgagctccaggccacggaggacgcgaagctgcggctggaggtcaacatgcaggccctcaagggccagttcgagcgcgacctgcaggcccgggacgagcagaacgaggagaagcgccggcagctgcagcgccagctccacgagtacgagaccgagctggaggacgagcggaagcagcgcgccctggccgcggccgccaagaagaagctcgagggggacctgaaggacctggagctccaggccgacagcgcgatcaagggccgggaggaggccatcaagcagctgcgcaagctgcaggcccagatgaaggacttccagcgggagctcgaggacgcccgcgccagccgggacgagatcttcgcgaccgccaaggagaacgagaagaaggccaagtccctggaggccgacctgatgcagctccaggaggacctggccgcggccgagcgcgcccggaagcaggccgacctggagaaggaggagctcgccgaggagctggcgagctccctgagcgggcgcaacgccctccaggacgagaagcggcgcctggaggcccggatcgcccagctggaggaggagctcgaggaggagcagggcaacatggaggccatgtccgaccgcgtgcggaaggcgacccagcaggccgagcagctgagcaacgagctggccacggagcgctccaccgcccagaagaacgagagcgcgcgccagcagctcgagcggcagaacaaggagctgcgctccaagctgcacgagatggagggggccgtgaagtccaagttcaagagcaccatcgccgccctcgaggccaagatcgcgcagctggaggagcaggtcgagcaggaggcccgggagaagcaggccgccaccaagagcctgaagcagaaggacaagaagctcaaggagatcctgctccaggtggaggacgagcgcaagatggccgagcagtacaaggagcaggcggagaagggcaacgcccgggtgaagcagctgaagcgccagctggaggaggccgaggaggagtcccagcggatcaacgccaaccgccggaagctgcagcgcgagctcgacgaggccacggagagcaacgaggcgatgggccgggaggtcaacgccctgaagtccaagctgcgccgggggaacgagaccagcttcgtgccctcccgccggagcggcgggcgccgggtgatcgagaacgccgacggcagcgaggaggagaccgacacccgcgacgccgacttcaacgggacgaaggcgtccgag

SEQ ID NO: 375 - RNA, 1053 nt, synthetic construct
  misc_feature 1..1053: note = Homo sapiens__P35749-1__SMMHC(1527-1877) CDS opt1
  source 1..1053: mol_type = other RNA
gtgcacgagctggagaagtccaagcgcgccctcgagacccagatggaggagatgaagacccagctggaggagctggaggacgagctccaggccacggaggacgcgaagctgcggctggaggtcaacatgcaggccctcaagggccagttcgagcgcgacctgcaggcccgggacgagcagaacgaggagaagcgccggcagctgcagcgccagctccacgagtacgagaccgagctggaggacgagcggaagcagcgcgccctggccgcggccgccaagaagaagctcgagggggacctgaaggacctggagctccaggccgacagcgcgatcaagggccgggaggaggccatcaagcagctgcgcaagctgcaggcccagatgaaggacttccagcgggagctcgaggacgcccgcgccagccgggacgagatcttcgcgaccgccaaggagaacgagaagaaggccaagtccctggaggccgacctgatgcagctccaggaggacctggccgcggccgagcgcgcccggaagcaggccgacctggagaaggaggagctcgccgaggagctggcgagctccctgagcgggcgcaacgccctccaggacgagaagcggcgcctggaggcccggatcgcccagctggaggaggagctcgaggaggagcagggcaacatggaggccatgtccgaccgcgtgcggaaggcgacccagcaggccgagcagctgagcaacgagctggccacggagcgctccaccgcccagaagaacgagagcgcgcgccagcagctcgagcggcagaacaaggagctgcgctccaagctgcacgagatggagggggccgtgaagtccaagttcaagagcaccatcgccgccctcgaggccaagatcgcgcagctggaggagcaggtcgagcaggaggcccgggagaagcaggccgccaccaagagcctgaagcagaaggacaagaagctcaaggagatcctgctccaggtggaggacgagcgcaagatggccgagcagtacaaggagcaggcggagaagggcaacgcc

SEQ ID NO: 376 - RNA, 492 nt, synthetic construct
  misc_feature 1..492: note = Homo sapiens__P35749-1__SMMHC(1809-1972) CDS opt1
  source 1..492: mol_type = other RNA
aagtccaagttcaagagcaccatcgccgccctcgaggccaagatcgcgcagctggaggagcaggtcgagcaggaggcccgggagaagcaggccgccaccaagagcctgaagcagaaggacaagaagctcaaggagatcctgctccaggtggaggacgagcgcaagatggccgagcagtacaaggagcaggcggagaagggcaacgcccgggtgaagcagctgaagcgccagctggaggaggccgaggaggagtcccagcggatcaacgccaaccgccggaagctgcagcgcgagctcgacgaggccacggagagcaacgaggcgatgggccgggaggtcaacgccctgaagtccaagctgcgccgggggaacgagaccagcttcgtgccctcccgccggagcggcgggcgccgggtgatcgagaacgccgacggcagcgaggaggagaccgacacccgcgacgccgacttcaacgggacgaaggcgtccgag

SEQ ID NO: 377 - RNA, 207 nt, synthetic construct
  misc_feature 1..207: note = Homo sapiens__P35749-1__SMMHC(1809-1877) CDS opt1
  source 1..207: mol_type = other RNA
aagtccaagttcaagagcaccatcgccgccctcgaggccaagatcgcgcagctggaggagcaggtcgagcaggaggcccgggagaagcaggccgccaccaagagcctgaagcagaaggacaagaagctcaaggagatcctgctccaggtggaggacgagcgcaagatggccgagcagtacaaggagcaggcggagaagggcaacgcc

SEQ ID NO: 378 - RNA, 69 nt, synthetic construct; identical to SEQ ID NO: 316
  misc_feature 1..69: note = Artificial____Lifeact CDS opt1
  source 1..69: mol_type = other RNA

SEQ ID NO: 379 - RNA, 51 nt, synthetic construct; identical to SEQ ID NO: 255
  misc_feature 1..51: note = Saccharomyces cerevisiae S288C__NP_014882.4__Lifeact(1-17) CDS opt1
  source 1..51: mol_type = other RNA

SEQ ID NO: 380 - RNA, 2481 nt, synthetic construct
  misc_feature 1..2481: note = Homo sapiens__Q16665-1__HIF1alpha CDS opt1
  source 1..2481: mol_type = other RNA
atggagggcgccgggggcgccaacgacaagaagaagatcagctccgagcgccggaaggagaagtcccgcgacgcggcccggtcccgccggagcaaggagtccgaggtgttctacgagctggcccaccagctccccctgccgcacaacgtcagctcccacctggacaaggccagcgtgatgcgcctcaccatctcctacctgcgggtgcgcaagctgctcgacgccggggacctggacatcgaggacgacatgaaggcgcagatgaactgcttctacctgaaggccctcgacggcttcgtcatggtgctgaccgacgacggggacatgatctacatcagcgacaacgtgaacaagtacatgggcctgacgcagttcgagctcaccggccactccgtcttcgacttcacccacccctgcgaccacgaggagatgcgggagatgctgacccaccgcaacgggctggtgaagaagggcaaggagcagaacacgcagcggagcttcttcctccgcatgaagtgcaccctgacctcccgggggcgcaccatgaacatcaagagcgccacgtggaaggtgctgcactgcaccggccacatccacgtctacgacaccaactccaaccagccccagtgcgggtacaagaagcccccgatgacctgcctcgtgctgatctgcgagcccatcccccaccccagcaacatcgagatcccgctggactccaagacgttcctcagccggcactccctggacatgaagttcagctactgcgacgagcgcatcaccgagctgatgggctacgagcccgaggagctcctgggccggagcatctacgagtactaccacgccctggactccgaccacctcaccaagacccaccacgacatgttcacgaagggccaggtgaccaccgggcagtaccgcatgctggcgaagcgcgggggctacgtctgggtggagacccaggccacggtgatctacaacaccaagaacagccagccccagtgcatcgtctgcgtgaactacgtggtctccggcatcatccagcacgacctgatcttcagcctccagcagaccgagtgcgtgctgaagcccgtggagtccagcgacatgaagatgacccagctgttcacgaaggtcgagtccgaggacaccagctccctcttcgacaagctgaagaaggagccggacgccctgaccctcctggcccccgccgcgggggacaccatcatcagcctggacttcggctccaacgacacggagaccgacgaccagcagctcgaggaggtgcccctgtacaacgacgtgatgctgcccagcccgaacgagaagctccagaacatcaacctggccatgagccccctgcccaccgccgagacccccaagccgctccggagctccgccgaccccgccctgaaccaggaggtcgcgctgaagctggagcccaaccccgagagcctcgagctgtccttcacgatgccgcagatccaggaccagacccccagcccctccgacgggagcacccggcagagctcccccgagccgaacagcccctccgagtactgcttctacgtggacagcgacatggtcaacgagttcaagctggagctcgtggagaagctgttcgccgaggacaccgaggccaagaaccccttctccacgcaggacaccgacctggacctcgagatgctggccccgtacatccccatggacgacgacttccagctgcgcagcttcgaccagctcagccccctggagtcctccagcgcctcccccgagagcgcgtccccgcagagcaccgtgaccgtcttccagcagacccagatccaggagcccacggccaacgccaccaccaccacggccaccaccgacgagctgaagaccgtgacgaaggaccgcatggaggacatcaagatcctcatcgcctcccccagccccacccacatccacaaggagaccacctccgcgacgagcagcccgtaccgggacacccagtcccgcaccgccagccccaaccgggccggcaagggggtgatcgagcagaccgagaagtcccacccccgcagccccaacgtcctgtccgtggccctgagccagcggacgaccgtgccggaggaggagctcaaccccaagatcctggcgctgcagaacgcccagcgcaagcggaagatggagcacgacggctccctcttccaggccgtcggcatcgggaccctgctgcagcagcccgacgaccacgccgccaccacgagcctctcctggaagcgcgtgaagggctgcaagagctccgagcagaacgggatggagcagaagaccatcatcctgatccccagcgacctggcgtgccggctcctgggccagtccatggacgagagcgggctgccgcagctcacctcctacgactgcgaggtgaacgcccccatccagggcagccgcaacctgctgcagggcgaggagctcctgcgggccctggaccaggtcaactga

SEQ ID NO: 381 - RNA, 81 nt, synthetic construct
  misc_feature 1..81: note = Homo sapiens__Q16665-1__HIF1alpha(549-575) CDS opt1
  source 1..81: mol_type = other RNA
cccttcagcacccaggacaccgacctggacctcgagatgctggccccgtacatccccatggacgacgacttccagctgcgc

SEQ ID NO: 382 - RNA, 45 nt, synthetic construct; identical to SEQ ID NO: 258
  misc_feature 1..45: note = Artificial____Linker CDS opt1
  source 1..45: mol_type = other RNA

SEQ ID NO: 383 - RNA, 1362 nt, synthetic construct
  misc_feature 1..1362: note = Homo sapiens__Q01196-1__RUNX1(K83E_R174Q) CDS opt1
  source 1..1362: mol_type = other RNA
atgcgcatccccgtggacgccagcacctcccggcgcttcaccccgcccagcacggccctgtcccccggcaagatgagcgaggcgctccccctgggggccccggacgccggcgccgccctggcggggaagctccggtccggcgaccgcagcatggtcgaggtgctggccgaccaccccggggagctggtgcggaccgactcccccaacttcctctgcagcgtcctgcccacccactggcgctgcaacgagaccctgccgatcgccttcaaggtggtggccctcggcgacgtccccgacggcacgctggtgaccgtgatggcggggaacgacgagaactactccgccgagctgcggaacgccaccgccgccatgaagaaccaggtcgcgcgcttcaacgacctccggttcgtgggccgcagcgggcggggcaagtccttcaccctgacgatcaccgtgttcaccaacccgccccaggtcgccacctaccaccgcgccatcaagatcacggtggacgggccccaggagccccgccggcaccgccagaagctggacgaccagaccaagcccggcagcctctccttcagcgagcggctgtccgagctggagcagctccgccggaccgccatgcgcgtgagcccccaccacccggcccccacccccaacccccgggcgtccctgaaccacagcacggccttcaacccgcagccccagtcccagatgcaggacacccgccagatccagcccagcccgccctggagctacgaccagtcctaccagtacctgggcagcatcgcctcccccagcgtccaccccgccacccccatctccccggggcgcgccagcggcatgaccacgctctccgcggagctgagctcccggctgagcaccgcccccgacctcaccgccttctccgacccccgccagttcccggccctgcccagcatctccgacccccggatgcactaccccggggccttcacctacagcccgacgcccgtgacctccggcatcggcatcgggatgagcgcgatgggctccgccacccgctaccacacctacctgcccccgccctaccccgggagctcccaggcccagggcgggcccttccaggccagcagcccctcctaccacctctactacggcgcgagcgccggctcctaccagttcagcatggtcgggggcgagcggtccccgccccgcatcctgccgccctgcacgaacgccagcaccgggtccgccctgctcaaccccagcctgcccaaccagtccgacgtggtggaggccgagggcagccactccaacagccccaccaacatggcgccctccgcccggctggaggaggccgtgtggcgcccgtactga

SEQ ID NO: 384 - RNA, 1362 nt, synthetic construct
  misc_feature 1..1362: note = Homo sapiens__Q01196-1__RUNX1 CDS opt1
  source 1..1362: mol_type = other RNA
atgcgcatccccgtggacgccagcacctcccggcgcttcaccccgcccagcacggccctgtcccccggcaagatgagcgaggcgctccccctgggggccccggacgccggcgccgccctggcggggaagctccggtccggcgaccgcagcatggtcgaggtgctggccgaccaccccggggagctggtgcggaccgactcccccaacttcctctgcagcgtcctgcccacccactggcgctgcaacaagaccctgccgatcgccttcaaggtggtggccctcggcgacgtccccgacggcacgctggtgaccgtgatggcggggaacgacgagaactactccgccgagctgcggaacgccaccgccgccatgaagaaccaggtcgcgcgcttcaacgacctccggttcgtgggccgcagcgggcggggcaagtccttcaccctgacgatcaccgtgttcaccaacccgccccaggtcgccacctaccaccgcgccatcaagatcacggtggacgggccccgggagccccgccggcaccgccagaagctggacgaccagaccaagcccggcagcctctccttcagcgagcggctgtccgagctggagcagctccgccggaccgccatgcgcgtgagcccccaccacccggcccccacccccaacccccgggcgtccctgaaccacagcacggccttcaacccgcagccccagtcccagatgcaggacacccgccagatccagcccagcccgccctggagctacgaccagtcctaccagtacctgggcagcatcgcctcccccagcgtccaccccgccacccccatctccccggggcgcgccagcggcatgaccacgctctccgcggagctgagctcccggctgagcaccgcccccgacctcaccgccttctccgacccccgccagttcccggccctgcccagcatctccgacccccggatgcactaccccggggccttcacctacagcccgacgcccgtgacctccggcatcggcatcgggatgagcgcgatgggctccgccacccgctaccacacctacctgcccccgccctaccccgggagctcccaggcccagggcgggcccttccaggccagcagcccctcctaccacctctactacggcgcgagcgccggctcctaccagttcagcatggtcgggggcgagcggtccccgccccgcatcctgccgccctgcacgaacgccagcaccgggtccgccctgctcaaccccagcctgcccaaccagtccgacgtggtggaggccgagggcagccactccaacagccccaccaacatggcgccctccgcccggctggaggaggccgtgtggcgcccgtactga

SEQ ID NO: 385 - RNA, 1443 nt, synthetic construct
  misc_feature 1..1443: note = Homo sapiens__Q01196-8__RUNX1 CDS opt1
  source 1..1443: mol_type = other RNA
atggccagcgactccatcttcgagagcttcccctcctacccgcagtgcttcatgcgcgagtgcatcctgggcatgaaccccagccgggacgtgcacgacgcctccaccagccgccggttcaccccgccctccacggcgctcagccccgggaagatgtccgaggccctgcccctgggcgcccccgacgccggggccgcgctcgccggcaagctgcgcagcggggaccggtccatggtcgaggtgctggccgaccaccccggcgagctcgtgcgcaccgacagcccgaacttcctgtgctccgtcctgcccacccactggcggtgcaacaagaccctccccatcgccttcaaggtggtggcgctgggcgacgtccccgacgggacgctggtgaccgtgatggccggcaacgacgagaactacagcgccgagctccgcaacgccaccgccgcgatgaagaaccaggtcgcccggttcaacgacctgcgcttcgtggggcggtccggccgcggcaagagcttcaccctgacgatcaccgtgttcaccaacccgccccaggtcgccacctaccaccgggccatcaagatcacggtggacgggccccgcgagccccggcgccaccggcagaagctcgacgaccagaccaagccgggctccctgagcttctccgagcgcctgagcgagctcgagcagctgcggcgcaccgccatgcgggtgagcccccaccaccccgcgcccaccccgaacccccgcgcctccctgaaccacagcacggccttcaacccccagccccagtcccagatgcaggacacccgccagatccagccgagcccgccctggtcctacgaccagagctaccagtacctcgggtccatcgccagcccctccgtccaccccgccacccccatcagccccggccgggcgtccgggatgaccacgctgagcgccgagctgtccagccgcctctccaccgccccggacctgaccgccttcagcgacccccggcagttccccgccctgccctccatcagcgacccgcgcatgcactaccccggcgcgttcacctactcccccacgcccgtgaccagcggcatcgggatcggcatgagcgccatggggtccgccacccggtaccacacctacctcccgccgccctaccccggcagctcccaggcccagggcgggcccttccaggcgagctcccccagctaccacctgtactacggcgcctccgccgggagctaccagttctccatggtgggcggggagcgcagcccgccccggatcctgccgccctgcacgaacgcctccaccggcagcgccctcctgaacccctccctgcccaaccagagcgacgtcgtggaggcggaggggtcccacagcaactcccccaccaacatggcccccagcgcccgcctcgaggaggccgtgtggcggccctactga

SEQ ID NO: 386 - RNA, 1419 nt, synthetic construct
  misc_feature 1..1419: note = Homo sapiens__Q01196-2__RUNX1 CDS opt1
  source 1..1419: mol_type = other RNA
atgcgcatccccgtggacgccagcacctcccggcgcttcaccccgcccagcacggccctgtcccccggcaagatgagcgaggcgctccccctgggggccccggacgccggcgccgccctggcggggaagctccggtccggcgaccgcagcatggtcgaggtgctggccgaccaccccggggagctggtgcggaccgactcccccaacttcctctgcagcgtcctgcccacccactggcgctgcaacaagaccctgccgatcgccttcaaggtggtggccctcggcgacgtccccgacggcacgctggtgaccgtgatggcggggaacgacgagaactactccgccgagctgcggaacgccaccgccgccatgaagaaccaggtcgcgcgcttcaacgacctccggttcgtgggccgcagcgggcggggcaagtccttcaccctgacgatcaccgtgttcaccaacccgccccaggtcgccacctaccaccgcgccatcaagatcacggtggacgggccccgggagccccgccggcaccgccagaagctggacgaccagaccaagcccggcagcctctccttcagcgagcggctgtccgagctggagcagctccgccggaccgccatgcgcgtgagcccccaccacccggcccccacccccaacccccgggcgtccctgaaccacagcacggccttcaacccgcagccccagtcccagatgcaggacacccgccagatccagcccagcccgccctggagctacgaccagtcctaccagtacctgggcagcatcgcctcccccagcgtccaccccgccacccccatctccccggggcgcgccagcggcatgaccacgctctccgcggagctgagctcccggctgagcaccgcccccgacctcaccgccttctccgacccccgccagttcccggccctgcccagcatctccgacccccggatgcactaccccggggccttcacctacagcccgacgcccgtgacctccggcatcggcatcgggatgagcgcgatgggctccgccacccgctaccacacctacctgcccccgccctaccccgggagctcccaggcccagggcgggcccttccaggccagcagcccctcctaccacctctactacggcgcgagcgccggctcctaccagttcagcatggtcgggggcgagcggtccccgccccgcatcctgccgccctgcacgaacgccagcaccgggtccgccctgctcaaccccagcctgcccaaccagtccgacgtggtggaggccgagggcagccactccaacagccccaccaacatgggcggggcgtcctgcagccggcaggcccgccgggaccccggcccgtgggcccgcaccccctcctgggggcggggccgccccacggaccggatcagcctgtga

SEQ ID NO: 387 - RNA, 1419 nt, synthetic construct
  misc_feature 1..1419: note = Homo sapiens__CAA56092.1__RUNX1 CDS opt1
  source 1..1419: mol_type = other RNA
atgcgcatccccgtggacgccagcacctcccggcgcttcaccccgcccagcacggccctgtcccccggcaagatgagcgaggcgctccccctgggggccccggacgccggcgccgccctggcggggaagctccggtccggcgaccgcagcatggtcgaggtgctggccgaccaccccggggagctggtgcggaccgactcccccaacttcctctgcagcgtcctgcccacccactggcgctgcaacaagaccctgccgatcgccttcaaggtggtggccctcggcgacgtccccgacggcacgctggtgaccgtgatggcggggaacgacgagaactactccgccgagctgcggaacgccaccgccgccatgaagaaccaggtcgcgcgcttcaacgacctccggttcgtgggccgcagcgggcggggcaagtccttcaccctgacgatcaccgtgttcaccaacccgccccaggtcgccacctaccaccgcgccatcaagatcacggtggacgggccccgggagccccgccggcaccgccagaagctggacgaccagaccaagcccggcagcctctccttcagcgagcggctgtccgagctggagcagctccgccggaccgccatgcgcgtgagcccccaccacccggcccccacccccaacccccgggcgtccctgaaccacagcacggccttcaacccgcagccccagtcccagatgcaggacacccgccagatccagcccagcccgccctggagctacgaccagtcctaccagtacctgggcagcatcgcctcccccagcgtccaccccgccacccccatctccccggggcgcgccagcggcatgaccacgctctccgcggagctgagctcccggctgagcaccgcccccgacctcaccgccttctccgacccccgccagttcccggccctgcccagcatctccgacccccggatgcactaccccggggccttcacctacagcccgacgcccgtgacctccggcatcggcatcgggatgagcgcgatgggctccgccacccgctaccacacctacctgcccccgccctaccccgggagctcccaggcccagggcgggcccttccaggccagcagcccctcctaccacctctactacggcgcgagcgccggctcctaccagttcagcatggtcgggggcgagcggtccccgccccgcatcctgccgccctgcacgaacgccagcaccgggtccgccctgctcaaccccagcctgcccaaccagtccgacgtggtggaggccgagggccggcaccgcaacagccccaccaacatgggcggggcgtcctgcagccggcaggcccgccgggaccccggcccgtgggcccgcaccccctcctgggggcggggccgccccacggaccggatcagcctgtga

SEQ ID NO: 388 - RNA, 1407 nt, synthetic construct
  misc_feature 1..1407: note = Homo sapiens__Q01196-10__RUNX1 CDS opt1
  source 1..1407: mol_type = other RNA
atgcccgccgccccgcgcggccccgcgcagggggaggccgccgcccggacccgcagccgggacgcctccaccagccgccggttcacgccgccctccaccgcgctgagccccggcaagatgtccgaggccctccccctgggggcccccgacgccggcgcggccctggccgggaagctccgcagcggcgaccggtccatggtggaggtcctggccgaccaccccggcgagctggtgcgcaccgacagcccgaacttcctctgctccgtgctgcccacccactggcggtgcaacaagacgctgcccatcgccttcaaggtcgtggcgctcggggacgtgcccgacggcaccctggtcaccgtgatggccgggaacgacgagaactacagcgccgagctgcgcaacgccaccgccgcgatgaagaaccaggtggcccggttcaacgacctccgcttcgtcggccggtccgggcgcggcaagagcttcacgctgaccatcaccgtgttcaccaacccgccccaggtggccacgtaccaccgggccatcaagatcaccgtcgacggcccccgcgagccccggcgccaccggcagaagctggacgaccagaccaagccggggtccctcagcttctccgagcgcctgagcgagctggagcagctccggcgcaccgccatgcgcgtgagcccccaccaccccgcgcccacgccgaacccccgggcctccctgaaccactccaccgccttcaacccccagccccagagccagatgcaggacacccgccagatccagccgagcccgccctggtcctacgaccagagctaccagtacctgggctccatcgccagcccctccgtgcaccccgccacccccatcagccccgggcgggcgtccggcatgacgaccctcagcgccgagctgtccagccgcctgtccaccgccccggacctcaccgccttcagcgacccccggcagttccccgcgctgccctccatcagcgacccgcgcatgcactaccccggcgccttcacgtactcccccacccccgtcaccagcgggatcggcatcgggatgtccgccatgggcagcgccacccggtaccacacgtacctgccgccgccctaccccgggtccagccaggcccagggcggccccttccaggcgagctcccccagctaccacctctactacggggcctccgccggcagctaccagttctccatggtcgggggcgagcgcagcccgccccggatcctgccgccctgcaccaacgcctccaccgggagcgccctgctcaacccctccctgcccaaccagagcgacgtggtggaggcggagggctcccacagcaactcccccaccaacatggcccccagcgcccgcctggaggaggccgtgtggcggccctactga

SEQ ID NO: 389 - RNA, 1371 nt, synthetic construct
  misc_feature 1..1371: note = Homo sapiens__Q01196-9__RUNX1 CDS opt1
  source 1..1371: mol_type = other RNA
atgaaccccagccgcgacgtgcacgacgcctccaccagccggcgcttcaccccgccctccacggccctgagccccggcaagatgtccgaggcgctccccctgggggccccggacgccggcgccgccctggcggggaagctccggagcggcgaccgctccatggtcgaggtgctggccgaccaccccggggagctggtgcggaccgacagccccaacttcctctgctccgtcctgcccacccactggcgctgcaacaagaccctgccgatcgccttcaaggtggtggccctcggcgacgtccccgacggcacgctggtgaccgtgatggcggggaacgacgagaactacagcgccgagctgcggaacgccaccgccgccatgaagaaccaggtcgcgcgcttcaacgacctccggttcgtgggccgctccgggcggggcaagagcttcaccctgacgatcaccgtgttcaccaacccgccccaggtcgccacctaccaccgcgccatcaagatcacggtggacgggccccgggagccccgccggcaccgccagaagctggacgaccagaccaagcccggctccctcagcttctccgagcggctgagcgagctggagcagctccgccggaccgccatgcgcgtgagcccccaccacccggcccccacccccaacccccgggcgtccctgaaccactccacggccttcaacccgcagccccagagccagatgcaggacacccgccagatccagcccagcccgccctggtcctacgaccagagctaccagtacctgggctccatcgccagcccctccgtccaccccgccacccccatcagcccggggcgcgcctccggcatgaccacgctcagcgcggagctgtccagccggctgtccaccgcccccgacctcaccgccttcagcgacccccgccagttcccggccctgccctccatcagcgacccccggatgcactaccccggggccttcacctactccccgacgcccgtgaccagcggcatcggcatcgggatgtccgcgatgggcagcgccacccgctaccacacctacctgcccccgccctaccccgggtccagccaggcccagggcgggcccttccaggccagctcccccagctaccacctctactacggcgcgtccgccggcagctaccagttctccatggtcgggggcgagcggagcccgccccgcatcctgccgccctgcacgaacgcctccaccgggagcgccctgctcaacccctccctgcccaaccagagcgacgtggtggaggccgagggctcccacagcaactcccccaccaacatggcgcccagcgcccggctggaggaggccgtgtggcgcccgtactga

SEQ ID NO: 390 - RNA, 1362 nt, synthetic construct
  misc_feature 1..1362: note = Homo sapiens__AAA51720.1__RUNX1 CDS opt1
  source 1..1362: mol_type = other RNA
atgcgcatccccgtggacgccagcacctcccggcgcttcaccccgcccagcacggccctgtcccccggcaagatgagcgaggcgctccccctgggggccccggacgccggcgccgccctggcggggaagctccggtccggcgaccgcagcatggtcgaggtgctggccgaccaccccggggagctggtgcggaccgactcccccaacttcctctgcagcgtcctgcccacccactggcgctgcaacaagaccctgccgatcgccttcaaggtggtggccctcggcgacgtccccgacggcacgctggtgaccgtgatggcggggaacgacgagaactactccgccgagctgcggaacgccaccgccgccatgaagaaccaggtcgcgcgcttcaacgacctccggttcgtgggccgcagcgggcggggcaagtccttcaccctgacgatcaccgtgttcaccaacccgccccaggtcgccacctaccaccgcgccatcaagatcacggtggacgggccccgggagccccgccggcaccgccagaagctggacgaccagaccaagcccggcagcctctccttcagcgagcggctgtccgagctggagcagctccgccggaccgccatgcgcgtgagcccccaccacccggcccccacccccaacccccgggcgtccctgaaccacagcacggccttcaacccgcagccccagtcccagatgcaggacacccgccagatccagcccagcccgccctggagctacgaccagtcctaccagtacctgggcagcatcgcctcccccagcgtccaccccgccacccccatctccccggggcgcgccagcggcatgaccacgctctccgcggagctgagctcccggctgagcaccgcccccgacctcaccgccttctccgacccccgccagttcccggccctgcccagcatctccgacccccggatgcactaccccggggccttcacctacagcccgacgcccgtgacctccggcatcggcatcgggatgagcgcgatgggctccgccacccgctaccacacctacctgcccccgccctaccccgggagctcccaggcccagggcgggcccttccaggccagcagcccctcctaccacctctactacggcgcgagcgccggctcctaccagttcagcatggtcgggggcgagcggtccccgccccgcatcctgccgccctgcacgaacgccagcaccgggttcgccctgctcaacccctccctgcccaaccagagcgacgtggtggaggccgagggctcccacagcaactcccccaccaacatggcgcccagcgcccggctggaggaggccgtgtggcgcccgtactga

SEQ ID NO: 391 - RNA, 1170 nt, synthetic construct
  misc_feature 1..1170: note = Homo sapiens__H9KVB1__RUNX1 CDS opt1
  source 1..1170: mol_type = other RNA
atgcgcatccccgtggacgccagcacctcccggcgcttcaccccgcccagcacggccctgtcccccggcaagatgagcgaggcgctccccctgggggccccggacgccggcgccgccctggcggggaagctccggtccggcgaccgcagcatggtcgaggtgctggccgaccaccccggggagctggtgcggaccgactcccccaacttcctctgcagcgtcctgcccacccactggcgctgcaacaagaccctgccgatcgccttcaaggtggtggccctcggcgacgtccccgacggcacgctggtgaccgtgatggcggggaacgacgagaactactccgccgagctgcggaacgccaccgccgccatgaagaaccaggtcgcgcgcttcaacgacctccggttcgtgggccgcagcgggcggggcaagtccttcaccctgacgatcaccgtgttcaccaacccgccccaggtcgccacctaccaccgcgccatcaagatcacggtggacgggccccgggagccccgcaacacccggcagatccagcccagcccgccctggtcctacgaccagagctaccagtacctgggctccatcgccagcccctccgtgcaccccgccacccccatcagcccgggccgcgcgtccgggatgaccacgctcagcgccgagctgagctcccggctgagcaccgcccccgacctcaccgccttctccgacccccgccagttccccgccctgccgagcatctccgacccccggatgcactaccccggcgcgttcacctacagccccacgccggtcacctccgggatcggcatcggcatgagcgccatggggtccgccacccgctaccacacctacctgcccccgccctaccccggcagctcccaggcccagggcgggcccttccaggccagctcccccagctaccacctctactacggggcgtccgccggcagctaccagttctccatggtgggcggggagcggagcccgccccgcatcctgccgccctgcacgaacgcctccaccggcagcgccctgctcaaccccagcctgcccaaccagtccgacgtggtcgaggcggaggggagccactccaacagccccaccaacatggccccctccgcccgcctggaggaggccgtgtggcggccgtactga

SEQ ID NO: 392 - RNA, 1047 nt, synthetic construct
  misc_feature 1..1047: note = Homo sapiens__Q01196-11__RUNX1 CDS opt1
  source 1..1047: mol_type = other RNA
atggccggcaacgacgagaactacagcgccgagctgcgcaacgcgaccgccgccatgaagaaccaggtggcccggttcaacgacctccgcttcgtcgggcggtccggccgcggcaagagcttcaccctgacgatcaccgtgttcaccaacccgccccaggtggccacctaccaccgggcgatcaagatcacggtcgacgggccccgcgagccccggcgccaccggcagaagctggacgaccagaccaagcccgggtccctcagcttctccgagcgcctgagcgagctggagcagctccggcgcaccgccatgcgggtgtccccgcaccaccccgcccccacccccaacccgcgcgccagcctgaaccactccacggcgttcaacccccagccccagagccagatgcaggacacccggcagatccagccctccccgccctggagctacgaccagtcctaccagtacctgggcagcatcgcctcccccagcgtgcaccccgccaccccgatctcccccggccgcgccagcgggatgaccacgctctccgccgagctgagcagccggctgtccaccgcgcccgacctcaccgccttcagcgacccccgccagttcccggccctgccctccatcagcgacccccggatgcactaccccggcgccttcacctactccccgacgcccgtcaccagcgggatcggcatcgggatgtccgccatgggcagcgcgacccgctaccacacctacctgccgccgccctaccccggctccagccaggcccagggcgggcccttccaggcctccagcccctcctaccacctctactacggggccagcgccggctcctaccagttcagcatggtgggcggggagcggtccccgccccgcatcctgccgccctgcacgaacgcgagcaccggctccgccctgctcaaccccagcctgcccaaccagagcgacgtggtcgaggccgaggggtcccacagcaactcccccaccaacatggcccccagcgcccgcctggaggaggcggtgtggcggccctactga

SEQ ID NO: 393 - RNA, 774 nt, synthetic construct
  misc_feature 1..774: note = Homo sapiens__Q01196-4__RUNX1 CDS opt1
  source 1..774: mol_type = other RNA
atgcgcatccccgtggacgccagcacctcccggcgcttcaccccgcccagcacggccctgtcccccggcaagatgagcgaggcgctccccctgggggccccggacgccggcgccgccctggcggggaagctccggtccggcgaccgcagcatggtcgaggtgctggccgaccaccccggggagctggtgcggaccgactcccccaacttcctctgcagcgtcctgcccacccactggcgctgcaacaagaccctgccgatcgccttcaaggtggtggccctcggcgacgtccccgacggcacgctggtgaccgtgatggcggggaacgacgagaactactccgccgagctgcggaacgccaccgccgccatgaagaaccaggtcgcgcgcttcaacgacctccggttcgtgggccgcagcgggcggggcaagtccttcaccctgacgatcaccgtgttcaccaacccgccccaggtcgccacctaccaccgcgccatcaagatcacggtggacgggccccgggagccccgccggcaccgccagaagctggacgaccagaccaagcccggcagcctctccttcagcgagcggctgtccgagctggagcagctccgccggaccgccatgcgcgtgagcccccaccacccggcccccacccccaacccccgggcgtccctgaaccacagcacggccttcaacccgcagccccagtcccagatgcaggacacccgccagatccagcccagcccgccctggagctacgaccagtcctga

SEQ ID NO: 394 - RNA, 771 nt, synthetic construct
  misc_feature 1..771: note = Homo sapiens__A8MZI9__RUNX1 CDS opt1
  source 1..771: mol_type = other RNA
atgcccgccgccccgcgcggccccgcgcagggggaggccgccgcccggacccgcagccgggacgcctccaccagccgccggttcacgccgccctccaccgcgctgagccccggcaagatgtccgaggccctccccctgggggcccccgacgccggcgcggccctggccgggaagctccgcagcggcgaccggtccatggtggaggtcctggccgaccaccccggcgagctggtgcgcaccgacagcccgaacttcctctgctccgtgctgcccacccactggcggtgcaacaagacgctgcccatcgccttcaaggtcgtggcgctcggggacgtgcccgacggcaccctggtcaccgtgatggccgggaacgacgagaactacagcgccgagctgcgcaacgccaccgccgcgatgaagaaccaggtggcccggttcaacgacctccgcttcgtcggccggtccgggcgcggcaagagcttcacgctgaccatcaccgtgttcaccaacccgccccaggtggccacgtaccaccgggccatcaagatcaccgtcgacggcccccgcgagccccggcgccaccggcagaagctggacgaccagaccaagccggggtccctcagcttctccgagcgcctgagcgagctggagcagctccggcgcaccgccatgcgcgtgagcccccaccaccccgcgcccacgccgaacccccgggcctccctgaaccactccaccgccttcaacccccagccccagagccagatgcagtga

SEQ ID NO: 395 - RNA, 753 nt, synthetic construct
  misc_feature 1..753: note = Homo sapiens__Q01196-3__RUNX1 CDS opt1
  source 1..753: mol_type = other RNA
atgcgcatccccgtggacgccagcacctcccggcgcttcaccccgcccagcacggccctgtcccccggcaagatgagcgaggcgctccccctgggggccccggacgccggcgccgccctggcggggaagctccggtccggcgaccgcagcatggtcgaggtgctggccgaccaccccggggagctggtgcggaccgactcccccaacttcctctgcagcgtcctgcccacccactggcgctgcaacaagaccctgccgatcgccttcaaggtggtggccctcggcgacgtccccgacggcacgctggtgaccgtgatggcggggaacgacgagaactactccgccgagctgcggaacgccaccgccgccatgaagaaccaggtcgcgcgcttcaacgacctccggttcgtgggccgcagcgggcggggcaagtccttcaccctgacgatcaccgtgttcaccaacccgccccaggtcgccacctaccaccgcgccatcaagatcacggtggacgggccccgggagccccgccggcaccgccagaagctggacgaccagaccaagcccggcagcctctccttcagcgagcggctgtccgagctggagcagctccgccggaccgccatgcgcgtgagcccccaccacccggcccccacccccaacccccgggcgtccctgaaccacagcacggccttcaacccgcagccccagtcccagatgcaggaggaggacaccgccccctggcgctgctga

SEQ ID NO: 396 - RNA, 729 nt, synthetic construct
  misc_feature 1..729: note = Homo sapiens__Q01196-7__RUNX1 CDS opt1
  source 1..729: mol_type = other RNA
atgcgcatccccgtggacgccagcacctcccggcgcttcaccccgcccagcacggccctgtcccccggcaagatgagcgaggcgctccccctgggggccccggacgccggcgccgccctggcggggaagctccggtccggcgaccgcagcatggtcgaggtgctggccgaccaccccggggagctggtgcggaccgactcccccaacttcctctgcagcgtcctgcccacccactggcgctgcaacaagaccctgccgatcgccttcaaggtggtggccctcggcgacgtccccgacggcacgctggtgaccgtgatggcggggaacgacgagaactactccgccgagctgcggaacgccaccgccgccatgaagaaccaggtcgcgcgcttcaacgacctccggttcgtggacggcccccgcgagccccggcgccaccggcagaagctggacgaccagaccaagccggggagcctgtccttcagcgagcgcctctccgagctggagcagctgcggcgcacggccatgcgggtgagcccccaccaccccgcccccaccccgaacccccgcgcctccctcaaccacagcaccgccttcaacccccagccccagtcccagatgcaggacacccggcagatccagccgagcccgccctggtcctacgaccagagctaccagtacctgggcagcatcgcgtcccccagcgtccaccccgccacgcccatctga

SEQ ID NO: 397 - RNA, 675 nt, synthetic construct
  misc_feature 1..675: note = Homo sapiens__Q01196-5__RUNX1 CDS opt1
  source 1..675: mol_type = other RNA
atgcgcatccccgtggacgccagcacctcccggcgcttcaccccgcccagcacggccctgtcccccggcaagatgagcgaggcgctccccctgggggccccggacgccggcgccgccctggcggggaagctccggtccggcgaccgcagcatggtcgaggtgctggccgaccaccccggggagctggtgcggaccgactcccccaacttcctctgcagcgtcctgcccacccactggcgctgcaacaagaccctgcccatcgccttcaaggtggtggccctcggcgacgtccccgacggcacgctggtgaccgtgatggcggggaacgacgagaactactccgccgagctgcggaacgccaccgccgccatgaagaaccaggtcgcgcgcttcaacgacctccggttcgtgggccgcagcgggcggggcaagtccttcaccctgacgatcaccgtgttcaccaacccgccccaggtcgccacctaccaccgcgccatcaagatcacggtggacgggccccgggagccccgcagcaagtgcatccacctgggcctcgtgcacccgcccggctggtacaccctgcaggccgggatcctgcgggaccacgtctccgacagcctcggctccaccttcccgcccgggggctggcaggcccccgtgaagcccaagagctga

SEQ ID NO: 398 - RNA, 567 nt, synthetic construct
  misc_feature 1..567: note = Homo sapiens__Q01196-6__RUNX1 CDS opt1
  source 1..567: mol_type = other RNA
atgcgcatccccgtggacgccagcacctcccggcgcttcaccccgcccagcacggccctgtcccccggcaagatgagcgaggcgctccccctgggggccccggacgccggcgccgccctggcggggaagctccggtccggcgaccgcagcatggtcgaggtgctggccgaccaccccggggagctggtgcggaccgactcccccaacttcctctgcagcgtcctgcccacccactggcgctgcaacaagaccctgccgatcgccttcaaggtggtggccctcggcgacgtccccgacggcacgctggtgaccgtgatggcggggaacgacgagaactactccgccgagctgcggaacgccaccgccgccatgaagaaccaggtcgcgcgcttcaacgacctccggttcgtgggccgcagcgggcggggcaagtccttcaccctgacgatcaccgtgttcaccaacccgccccaggtcgccacctaccaccgcgccatcaagatcacggtggacgggccccgggagccccgcaacagcctgacctggccccggtacccccacatctga

SEQ ID NO: 399 - RNA, 384 nt, synthetic construct
  misc_feature 1..384: note = Homo sapiens__Q01196-1__RUNX1(1-128) CDS opt1
  source 1..384: mol_type = other RNA
atgcgcatccccgtggacgccagcacctcccggcgcttcaccccgcccagcacggccctgtcccccggcaagatgagcgaggcgctccccctgggggccccggacgccggcgccgccctggcggggaagctccggtccggcgaccgcagcatggtcgaggtgctggccgaccaccccggggagctggtgcggaccgactcccccaacttcctctgcagcgtcctgcccacccactggcgctgcaacaagaccctgccgatcgccttcaaggtggtggccctcggcgacgtccccgacggcacgctggtgaccgtgatggcggggaacgacgagaactactccgccgagctgcggaacgccaccgccgccatgaagaaccaggtc

SEQ ID NO: 400 - RNA, 531 nt, synthetic construct
  misc_feature 1..531: note = Homo sapiens__Q01196-1__RUNX1(1-177) CDS opt1
  source 1..531: mol_type = other RNA
atgcgcatccccgtggacgccagcacctcccggcgcttcaccccgcccagcacggccctgtcccccggcaagatgagcgaggcgctccccctgggggccccggacgccggcgccgccctggcggggaagctccggtccggcgaccgcagcatggtcgaggtgctggccgaccaccccggggagctggtgcggaccgactcccccaacttcctctgcagcgtcctgcccacccactggcgctgcaacaagaccctgccgatcgccttcaaggtggtggccctcggcgacgtccccgacggcacgctggtgaccgtgatggcggggaacgacgagaactactccgccgagctgcggaacgccaccgccgccatgaagaaccaggtcgcgcgcttcaacgacctccggttcgtgggccgcagcgggcggggcaagtccttcaccctgacgatcaccgtgttcaccaacccgccccaggtcgccacctaccaccgcgccatcaagatcacggtggacgggccccgggagccccgc

SEQ ID NO: 401 - RNA, 723 nt, synthetic construct
  misc_feature 1..723: note = Homo sapiens__Q01196-1__RUNX1(1-241) CDS opt1
  source 1..723: mol_type = other RNA
atgcgcatccccgtggacgccagcacctcccggcgcttcaccccgcccagcacggccctgtcccccggcaagatgagcgaggcgctccccctgggggccccggacgccggcgccgccctggcggggaagctccggtccggcgaccgcagcatggtcgaggtgctggccgaccaccccggggagctggtgcggaccgactcccccaacttcctctgcagcgtcctgcccacccactggcgctgcaacaagaccctgccgatcgccttcaaggtggtggccctcggcgacgtccccgacggcacgctggtgaccgtgatggcggggaacgacgagaactactccgccgagctgcggaacgccaccgccgccatgaagaaccaggtcgcgcgcttcaacgacctccggttcgtgggccgcagcgggcggggcaagtccttcaccctgacgatcaccgtgttcaccaacccgccccaggtcgccacctaccaccgcgccatcaagatcacggtggacgggccccgggagccccgccggcaccgccagaagctggacgaccagaccaagcccggcagcctctccttcagcgagcggctgtccgagctggagcagctccgccggaccgccatgcgcgtgagcccccaccacccggcccccacccccaacccccgggcgtccctgaaccacagcacggccttcaacccgcagccccagtcccagatgcag

SEQ ID NO: 402 - RNA, 1815 nt, synthetic construct
  misc_feature 1..1815: note = Homo sapiens__Q06455-1__RUNX1T1a CDS opt1
  source 1..1815: mol_type = other RNA
atgatcagcgtgaagcgcaacacctggcgggccctgtccctcgtcatcggcgactgccgcaagaaggggaacttcgagtactgccaggaccggaccgagaagcacagcacgatgcccgactccccggtggacgtgaagacccagagccgcctgaccccgcccaccatgcccccgccgcccacgacccagggcgcgccccggacctccagcttcacccccacgaccctgaccaacgggacctcccacagccccacggccctcaacggcgccccctccccgcccaacgggttcagcaacggcccctccagctccagctccagctccctggccaaccagcagctgccgcccgcctgcggcgcccgccagctcagcaagctgaagcggttcctgaccaccctccagcagttcgggaacgacatctcccccgagatcggcgagcgcgtccggaccctggtgctggggctcgtgaacagcacgctgaccatcgaggagttccacagcaagctgcaggaggcgaccaacttccccctccgccccttcgtcatccccttcctgaaggccaacctgcccctcctgcagcgggagctgctccactgcgcccgcctggccaagcagaaccccgcgcagtacctggcccagcacgagcagctcctgctggacgcctccaccacgagccccgtggactccagcgagctcctgctggacgtgaacgagaacggcaagcggcgcacccccgaccggaccaaggagaacgggttcgaccgcgagccgctccactccgagcaccccagcaagcggccctgcaccatctcccccggccagcgctacagcccgaacaacggcctgtcctaccagcccaacgggctgccccacccgacgcccccgccgccccagcactaccggctcgacgacatggccatcgcccaccactaccgcgacagctaccggcacccctcccaccgcgacctgcgcgaccggaaccgccccatgggcctgcacgggacccggcaggaggagatgatcgaccaccgcctcaccgaccgggagtgggcggaggagtggaagcacctggaccacctcctgaactgcatcatggacatggtcgagaagacccgccggagcctgacggtgctgcgccggtgccaggaggccgaccgcgaggagctcaactactggatccggcgctactccgacgccgaggacctgaagaagggcggcgggagctccagctcccacagccggcagcagtcccccgtgaaccccgaccccgtcgccctggacgcccaccgcgagttcctccaccggcccgcgagcggctacgtgcccgaggagatctggaagaaggccgaggaggccgtgaacgaggtcaagcgccaggccatgaccgagctgcagaaggccgtgagcgaggcggagcggaaggcccacgacatgatcaccaccgagcgcgccaagatggagcggacggtggccgaggccaagcgccaggcggccgaggacgccctggccgtcatcaaccagcaggaggactccagcgagtcctgctggaactgcgggcgcaaggcgagcgagacctgctccggctgcaacaccgcccggtactgcgggagcttctgccagcacaaggactgggagaagcaccaccacatctgcggccagaccctgcaggcccagcagcagggcgacacgccggccgtgtccagctccgtgacccccaacagcggggccggctcccccatggacacgcccccggcggccacgccccgcagcaccacccccgggaccccctccaccatcgagaccaccccgcggtga

SEQ ID NO: 403 - RNA, 1992 nt, synthetic construct
  misc_feature 1..1992: note = Homo sapiens__A0A0A0MSU1__RUNX1T1a CDS opt1
  source 1..1992: mol_type = other RNA
atgtgccaccccgacaaggccttcaccagcgacaagctgcagtgcgtgttcaacgagtacaaggccgcggtctgggtgccgccccgcccccggcccctctcccgcgccccgctgcccgaggccggcggggagaacctgcacctcaagatcagccgggtgcgcaagcggaacctgcccttcgtcgtgtggggcgaggaggaggcctccacccccgggctggacgccatcagccaccacctctgctacccggaccgcacgcaccgggaccgcaccgagaagcactccaccatgcccgacagccccgtggacgtcaagacccagtcccggctgacgcccccgaccatgcccccccccccgaccacccagggcgcgccccgcacgagctccttcacccccaccaccctgacgaacgggaccagccactcccccaccgccctcaacggcgccccgagcccccccaacggcttctccaacgggcccagctccagctccagctccagcctggccaaccagcagctgccgcccgcgtgcggcgcccggcagctcagcaagctgaagcgcttcctgaccacgctccagcagttcgggaacgacatctcccccgagatcggcgagcgggtgcgcaccctggtgctggggctcgtcaacagcaccctgaccatcgaggagttccactccaagctgcaggaggccacgaacttccccctccggccgttcgtgatccccttcctgaaggccaacctgcccctcctgcagcgcgagctgctccactgcgcccggctggcgaagcagaacccggcccagtacctggcccagcacgagcagctcctgctggacgccagcaccacctcccccgtggacagctccgagctcctgctggacgtcaacgagaacggcaagcgccggacccccgaccgcacgaaggagaacggcttcgaccgggagcccctccacagcgagcacccgtccaagcgcccctgcaccatcagccccgggcagcgctactcccccaacaacggcctgagctaccagccgaacgggctgccccaccccacccccccgcccccccagcactaccggctcgacgacatggccatcgcgcaccactaccgcgactcctaccggcaccccagccaccgcgacctgcgggaccgcaaccggccgatgggcctgcacggcacccgccaggaggagatgatcgaccaccggctcacggaccgcgagtgggccgaggagtggaagcacctggaccacctgctcaactgcatcatggacatggtggagaagacccggcgctccctgaccgtgctgcggcgctgccaggaggccgaccgggaggagctgaactactggatccgccggtacagcgacgccgaggacctcaagaaggggggcgggtccagctccagccacagccgccagcagtcccccgtcaaccccgaccccgtggccctggacgcgcaccgggagttcctgcaccgcccggccagcggctacgtgcccgaggagatctggaagaaggccgaggaggccgtcaacgaggtgaagcgccaggccatgaccgagctccagaaggcggtgtccgaggccgagcggaaggcccacgacatgatcacgaccgagcgcgccaagatggagcggaccgtcgcggaggccaagcgccaggccgccgaggacgccctggcggtgatcaaccagcaggaggacagctccgagagctgctggaactgcgggcggaaggcctccgagacctgcagcggctgcaacacggcccgctactgcggctccttctgccagcacaaggactgggagaagcaccaccacatctgcgggcagaccctgcaggcccagcagcagggcgacacccccgccgtgagctccagcgtcacccccaactccggggcgggcagcccgatggacaccccccccgccgccacgccgcggtccaccacccccgggacccccagcacgatcgagaccaccccccgctga

SEQ ID NO: 404 - RNA, 1848 nt, synthetic construct
  misc_feature 1..1848: note = Homo sapiens__Q06455-3__RUNX1T1a CDS opt1
  source 1..1848: mol_type = other RNA
atgtgccaccccgacaaggccttcaccagcgacaagctgcagtgcgtgttcaacgagtacaaggccgcggtctgggtgccgccccgcccccggcccctctcccgcgccccgctgcccgaggaccggaccgagaagcacagcacgatgcccgactcccccgtggacgtcaagacccagagccgcctgaccccgcccaccatgccgccgccgcccacgacccagggcgcgccccggacctccagcttcacccccacgaccctcaccaacgggacctcccacagccccacggccctgaacggcgccccctccccgcccaacgggttcagcaacggcccctccagctccagctccagctccctggccaaccagcagctcccgcccgcctgcggggcccgccagctgagcaagctgaagcggttcctcaccaccctgcagcagttcggcaacgacatctcccccgagatcggcgagcgcgtgcggaccctggtgctcgggctggtcaacagcacgctgaccatcgaggagttccacagcaagctccaggaggccaccaacttccccctgcgccccttcgtgatccccttcctgaaggcgaacctccccctgctgcagcgggagctcctgcactgcgcccgcctggccaagcagaaccccgcccagtacctcgcccagcacgagcagctgctgctcgacgcgtccaccacgagccccgtggactccagcgagctgctgctcgacgtcaacgagaacggcaagcggcgcacccccgaccggaccaaggagaacgggttcgaccgcgagccgctgcactccgagcaccccagcaagcggccctgcaccatctcccccggccagcgctacagcccgaacaacgggctgtcctaccagcccaacggcctcccccaccccacgccgcccccgccccagcactaccggctggacgacatggccatcgcccaccactaccgcgacagctaccggcacccctcccaccgcgacctgcgcgaccggaaccgccccatgggcctccacgggacccggcaggaggagatgatcgaccaccgcctgaccgaccgggagtgggccgaggagtggaagcacctggaccacctcctgaactgcatcatggacatggtggagaagacccgccggagcctgacggtgctccgccggtgccaggaggccgaccgcgaggagctgaactactggatccggcgctactccgacgcggaggacctgaagaagggcgggggcagctccagctcccacagccggcagcagtcccccgtcaaccccgacccggtggccctcgacgcccaccgcgagttcctgcaccggcccgccagcggctacgtgcccgaggagatctggaagaaggccgaggaggcggtcaacgaggtgaagcgccaggccatgaccgagctgcagaaggccgtgagcgaggccgagcggaaggcccacgacatgatcaccaccgagcgcgcgaagatggagcggacggtcgccgaggccaagcgccaggccgcggaggacgccctggccgtgatcaaccagcaggaggactccagcgagtcctgctggaactgcgggcgcaaggccagcgagacctgctccggctgcaacaccgcccggtactgcgggagcttctgccagcacaaggactgggagaagcaccaccacatctgcggccagaccctccaggcgcagcagcagggggacacgcccgccgtgtccagctccgtcaccccgaacagcggcgccggctcccccatggacaccccgcccgccgccacgccccgcagcaccacccccgggaccccctccaccatcgagaccacgccgcggtga

SEQ ID NO: 405 - RNA, 1755 nt, synthetic construct
  misc_feature 1..1755: note = Homo sapiens__A0A087WWT6__RUNX1T1a CDS opt1
  source 1..1755: mol_type = other RNA
atggtgggcctgagcgggcccgtccagtaccgcaccgagaagcactccaccatgccggacagccccgtggacgtgaagacccagtcccggctcaccccgcccaccatgccgcccccgcccaccacgcagggcgcgccccgcaccagctccttcacccccaccacgctgaccaacgggaccagccactcccccaccgccctgaacggcgcccccagcccgcccaacgggttctccaacggccccagctccagctccagctccagcctcgccaaccagcagctgcccccggcctgcggcgcccggcagctgtccaagctcaagcgcttcctgacgaccctgcagcagttcgggaacgacatcagccccgagatcggcgagcgggtccgcaccctcgtgctggggctggtgaactccaccctcacgatcgaggagttccacagcaagctgcaggaggccaccaacttccccctgcggcccttcgtcatcccgttcctcaaggcgaacctgcccctgctccagcgcgagctgctgcactgcgcccggctcgccaagcagaaccccgcccagtacctggcgcagcacgagcagctgctcctggacgccagcaccacctcccccgtggacagctccgagctgctcctggacgtgaacgagaacggcaagcgccggacgccggaccgcaccaaggagaacgggttcgaccgggagcccctgcacagcgagcacccctccaagcgcccctgcaccatcagcccgggccagcggtactcccccaacaacggcctcagctaccagcccaacgggctgccgcaccccaccccgccgccgccccagcactaccgcctggacgacatggccatcgcccaccactaccgggactcctaccgccaccccagccaccgggacctccgcgaccggaaccgccccatgggcctgcacgggacgcgccaggaggagatgatcgaccaccggctgaccgaccgcgagtgggccgaggagtggaagcacctcgaccacctcctgaactgcatcatggacatggtcgagaagacccggcgctccctgaccgtgctgcggcgctgccaggaggcggaccgggaggagctgaactactggatccgccggtacagcgacgccgaggacctcaagaagggcggcgggtccagctccagccactcccgccagcagagccccgtgaaccccgaccccgtcgccctggacgcccaccgggagttcctgcaccgccccgcctccggctacgtgcccgaggagatctggaagaaggcggaggaggccgtgaacgaggtcaagcggcaggccatgacggagctccagaaggccgtgagcgaggccgagcgcaaggcgcacgacatgatcaccaccgagcgggccaagatggagcgcaccgtggccgaggccaagcggcaggccgcggaggacgccctggccgtcatcaaccagcaggaggacagctccgagagctgctggaactgcgggcgcaaggcctccgagacgtgcagcggctgcaacaccgcgcggtactgcgggtccttctgccagcacaaggactgggagaagcaccaccacatctgcggccagaccctgcaggcccagcagcagggcgacacccccgccgtgagctccagcgtgacgcccaactccggggccggcagccccatggacaccccgcccgccgcgacgccccgctccaccacccccgggacccccagcaccatcgagaccacgccccgctga

SEQ ID NO: 406 - RNA, 1734 nt, synthetic construct
  misc_feature 1..1734: note = Homo sapiens__Q06455-2__RUNX1T1a CDS opt1
  source 1..1734: mol_type = other RNA
atgcccgaccgcaccgagaagcacagcaccatgccggactcccccgtggacgtcaagacccagagccggctgaccccgcccaccatgccgcccccgcccaccacgcagggcgcgccccgcacctccagcttcacccccaccacgctcaccaacgggacctcccacagccccaccgccctgaacggcgccccctccccgcccaacgggttcagcaacggcccctccagctccagctccagctccctggccaaccagcagctgcccccggcctgcggggcccggcagctcagcaagctgaagcgcttcctcacgaccctgcagcagttcggcaacgacatctcccccgagatcggcgagcgggtgcgcaccctggtgctcgggctggtcaacagcaccctgacgatcgaggagttccactccaagctccaggaggccaccaacttccccctgcggcccttcgtgatcccgttcctgaaggcgaacctccccctgctgcagcgcgagctcctgcactgcgcccggctggccaagcagaaccccgcccagtacctcgcgcagcacgagcagctgctgctcgacgccagcaccaccagccccgtggactccagcgagctgctgctcgacgtcaacgagaacggcaagcgccggacgccggaccgcaccaaggagaacgggttcgaccgggagcccctgcactccgagcaccccagcaagcgcccctgcaccatctccccgggccagcggtacagccccaacaacgggctgtcctaccagcccaacggcctcccgcaccccaccccgccgccgccccagcactaccgcctggacgacatggccatcgcccaccactaccgggacagctaccgccacccctcccaccgggacctgcgcgaccggaaccgccccatgggcctccacgggacgcgccaggaggagatgatcgaccaccggctgaccgaccgcgagtgggccgaggagtggaagcacctggaccacctcctgaactgcatcatggacatggtggagaagacccggcgcagcctgaccgtgctccggcgctgccaggaggcggaccgggaggagctgaactactggatccgccggtactccgacgccgaggacctgaagaagggcgggggcagctccagctcccacagccgccagcagtcccccgtcaaccccgaccccgtggccctcgacgcccaccgggagttcctgcaccgccccgccagcggctacgtgcccgaggagatctggaagaaggcggaggaggccgtcaacgaggtgaagcggcaggccatgacggagctgcagaaggccgtgtccgaggccgagcgcaaggcgcacgacatgatcaccaccgagcgggccaagatggagcgcaccgtcgccgaggccaagcggcaggccgcggaggacgccctcgccgtgatcaaccagcaggaggacagcagcgagtcctgctggaactgcgggcgcaaggccagcgagacgtgctccggctgcaacaccgcgcggtactgcgggagcttctgccagcacaaggactgggagaagcaccaccacatctgcggccagaccctgcaggcccagcagcagggggacacccccgccgtgtccagctccgtcacgcccaacagcggcgccggctcccccatggacaccccgcccgccgcgacgccccgcagcaccacccccgggaccccctccaccatcgagaccacgccccgctga

SEQ ID NO: 407 - RNA, 1704 nt, synthetic construct
  misc_feature 1..1704: note = Homo sapiens__Q06455-4__RUNX1T1a CDS opt1
  source 1..1704: mol_type = other RNA
atgcccgacagcccggtggacgtcaagacccagtcccgcctgaccccgcccacgatgcccccgccgcccaccacccagggcgcgccccggaccagctccttcacgcccaccaccctcaccaacgggacgagccactcccccaccgccctgaacggcgcccccagcccgcccaacgggttctccaacggccccagctccagctccagctccagcctggccaaccagcagctcccgcccgcctgcggggcccgccagctgtccaagctgaagcggttcctcaccaccctgcagcagttcggcaacgacatcagccccgagatcggcgagcgcgtgcggacgctggtgctcgggctggtcaactccaccctgaccatcgaggagttccacagcaagctccaggaggccaccaacttccccctgcgccccttcgtgatccccttcctgaaggcgaacctcccgctgctgcagcgggagctcctgcactgcgcccgcctggccaagcagaaccccgcccagtacctcgcgcagcacgagcagctgctgctcgacgcctccacgaccagccccgtggacagctccgagctgctgctcgacgtcaacgagaacggcaagcggcgcacccccgaccggaccaaggagaacgggttcgaccgcgagccgctgcacagcgagcacccctccaagcggccctgcacgatcagccccggccagcgctactccccgaacaacgggctgagctaccagcccaacggcctcccccacccgacgcccccgccgccccagcactaccggctggacgacatggccatcgcccaccactaccgcgactcctaccggcaccccagccaccgcgacctgcgggaccgcaaccggcccatgggcctccacgggacccgccaggaggagatgatcgaccaccgcctgaccgaccgggagtgggccgaggagtggaagcacctggaccacctcctgaactgcatcatggacatggtggagaagacccgccggtccctgaccgtgctccgccggtgccaggaggcggaccgcgaggagctgaactactggatccggcgctacagcgacgccgaggacctgaagaagggcgggggctccagctccagccactcccggcagcagagccccgtcaaccccgaccccgtggccctcgacgcccaccgcgagttcctgcaccggcccgcctccggctacgtgcccgaggagatctggaagaaggcggaggaggccgtcaacgaggtgaagcgccaggccatgaccgagctgcagaaggccgtgagcgaggccgagcggaaggcgcacgacatgatcaccacggagcgcgccaagatggagcggaccgtcgccgaggccaagcgccaggccgcggaggacgccctcgccgtgatcaaccagcaggaggactccagcgagagctgctggaactgcgggcggaaggcctccgagacctgcagcggctgcaacaccgcgcgctactgcgggtccttctgccagcacaaggactgggagaagcaccaccacatctgcggccagacgctgcaggcccagcagcagggggacacccccgccgtgagctccagcgtcacccccaactccggcgccggcagccccatggacacgcccccggccgcgacgccccggtccaccacccccgggacccccagcaccatcgagaccaccccgcgctga

SEQ ID NO: 408 - RNA, 1284 nt, synthetic construct
  misc_feature 1..1284: note = Homo sapiens__Q06455-5__RUNX1T1a CDS opt1
  source 1..1284: mol_type = other RNA
atgatcagcgtgaagcgcaacacctggcgggccctgtccctcgtcatcggcgactgccgcaagaaggggaacttcgagtactgccaggaccggaccgagaagcacagcacgatgcccgactccccggtggacgtgaagacccagagccgcctgaccccgcccaccatgcccccgccgcccacgacccagggcgcgccccggacctccagcttcacccccacgaccctgaccaacgggacctcccacagccccacggccctcaacggcgccccctccccgcccaacgggttcagcaacggcccctccagctccagctccagctccctggccaaccagcagctgccgcccgcctgcggcgcccgccagctcagcaagctgaagcggttcctgaccaccctccagcagttcgggaacgacatctcccccgagatcggcgagcgcgtccggaccctggtgctggggctcgtgaacagcacgctgaccatcgaggagttccacagcaagctgcaggaggcgaccaacttccccctccgccccttcgtcatccccttcctgaaggccaacctgcccctcctgcagcgggagctgctccactgcgcccgcctggccaagcagaaccccgcgcagtacctggcccagcacgagcagctcctgctggacgcctccaccacgagccccgtggactccagcgagctcctgctggacgtgaacgagaacggcaagcggcgcacccccgaccggaccaaggagaacgggttcgaccgcgagccgctccactccgagcaccccagcaagcggccctgcaccatctcccccggccagcgctacagcccgaacaacggcctgtcctaccagcccaacgggctgccccacccgacgcccccgccgccccagcactaccggctcgacgacatggccatcgcccaccactaccgcgacagctaccggcacccctcccaccgcgacctgcgcgaccggaaccgccccatgggcctgcacgggacccggcaggaggagatgatcgaccaccgcctcaccgaccgggagtgggcggaggagtggaagcacctggaccacctcctgaactgcatcatggacatggtcgagaagacccgccggagcctgacggtgctgcgccggtgccaggaggccgaccgcgaggagctcaactactggatccggcgctactccgacgccgaggacctgaagaagggcggcgggagctccagctcccacagccggcagcagtcccccgtgaaccccgaccccgtcgccctgggctga

SEQ ID NO: 409 - RNA, 1203 nt, synthetic construct
  misc_feature 1..1203: note = Homo sapiens__Q06455-6__RUNX1T1a CDS opt1
  source 1..1203: mol_type = other RNA
atgcccgaccgcaccgagaagcacagcaccatgcccgactcccccgtggacgtcaagacgcagagccggctgaccccgcccaccatgccgcccccgcccaccacgcagggcgcgccccgcacctccagcttcacccccaccacgctcaccaacgggacctcccacagccccaccgccctgaacggcgcgccctccccgcccaacgggttcagcaacggcccctccagctccagctccagctccctggccaaccagcagctgcccccggcctgcggggcccggcagctcagcaagctgaagcgcttcctcacgaccctgcagcagttcggcaacgacatctcccccgagatcggcgagcgggtgcgcaccctggtgctcgggctggtcaacagcaccctgacgatcgaggagttccactccaagctccaggaggccaccaacttccccctgcggcccttcgtgatccccttcctgaaggccaacctccccctgctgcagcgcgagctcctgcactgcgcccggctggccaagcagaaccccgcccagtacctcgcgcagcacgagcagctgctgctcgacgccagcaccaccagccccgtggactccagcgagctgctgctcgacgtcaacgagaacggcaagcgccggacgccggaccgcaccaaggagaacgggttcgaccgggagcccctgcactccgagcaccccagcaagcgcccctgcaccatctccccgggccagcggtacagccccaacaacgggctgtcctaccagcccaacggcctcccgcaccccaccccgccgccgccccagcactaccgcctggacgacatggccatcgcccaccactaccgggacagctaccgccacccctcccaccgggacctgcgcgaccggaaccgccccatgggcctccacgggacgcgccaggaggagatgatcgaccaccggctgaccgaccgcgagtgggccgaggagtggaagcacctggaccacctcctgaactgcatcatggacatggtggagaagacccggcgcagcctgaccgtgctccggcgctgccaggaggcggaccgggaggagctgaactactggatccgccggtactccgacgccgaggacctgaagaagggcgggggcagctccagctcccacagccgccagcagtcccccgtcaaccccgaccccgtggccctcggctga

SEQ ID NO: 410 - RNA, 1722 nt, synthetic construct
  misc_feature 1..1722: note = Homo sapiens__Q06455-1__RUNX1T1a(31-604) CDS opt1
  source 1..1722: mol_type = other RNA
cggaccgagaagcacagcacgatgcccgactccccggtggacgtgaagacccagagccgcctgaccccgcccaccatgcccccgccgcccacgacccagggcgcgccccggacctccagcttcacccccacgaccctgaccaacgggacctcccacagccccacggccctcaacggcgccccctccccgcccaacgggttcagcaacggcccctccagctccagctccagctccctggccaaccagcagctgccgcccgcctgcggcgcccgccagctcagcaagctgaagcggttcctgaccaccctccagcagttcgggaacgacatctcccccgagatcggcgagcgcgtccggaccctggtgctggggctcgtgaacagcacgctgaccatcgaggagttccacagcaagctgcaggaggcgaccaacttccccctccgccccttcgtcatccccttcctgaaggccaacctgcccctcctgcagcgggagctgctccactgcgcccgcctggccaagcagaaccccgcgcagtacctggcccagcacgagcagctcctgctggacgcctccaccacgagccccgtggactccagcgagctcctgctggacgtgaacgagaacggcaagcggcgcacccccgaccggaccaaggagaacgggttcgaccgcgagccgctccactccgagcaccccagcaagcggccctgcaccatctcccccggccagcgctacagcccgaacaacggcctgtcctaccagcccaacgggctgccccacccgacgcccccgccgccccagcactaccggctcgacgacatggccatcgcccaccactaccgcgacagctaccggcacccctcccaccgcgacctgcgcgaccggaaccgccccatgggcctgcacgggacccggcaggaggagatgatcgaccaccgcctcaccgaccgggagtgggcggaggagtggaagcacctggaccacctcctgaactgcatcatggacatggtcgagaagacccgccggagcctgacggtgctgcgccggtgccaggaggccgaccgcgaggagctcaactactggatccggcgctactccgacgccgaggacctgaagaagggcggcgggagctccagctcccacagccggcagcagtcccccgtgaaccccgaccccgtcgccctggacgcccaccgcgagttcctccaccggcccgcgagcggctacgtgcccgaggagatctggaagaaggccgaggaggccgtgaacgaggtcaagcgccaggccatgaccgagctgcagaaggccgtgagcgaggcggagcggaaggcccacgacatgatcaccaccgagcgcgccaagatggagcggacggtggccgaggccaagcgccaggcggccgaggacgccctggccgtcatcaaccagcaggaggactccagcgagtcctgctggaactgcgggcgcaaggcgagcgagacctgctccggctgcaacaccgcccggtactgcgggagcttctgccagcacaaggactgggagaagcaccaccacatctgcggccagaccctgcaggcccagcagcagggcgacacgccggccgtgtccagctccgtgacccccaacagcggggccggctcccccatggacacgcccccggcggccacgccccgcagcaccacccccgggaccccctccaccatcgagaccaccccgcgg

SEQ ID NO: 411 - RNA, 1815 nt, synthetic construct
  misc_feature 1..1815: note = Homo sapiens__O43439-1__RUNX1T1b CDS opt1
  source 1..1815: mol_type = other RNA
atggccaaggagagcggcatctccctgaaggagatccaggtgctcgcccgccagtggaaggtcgggcccgagaagcgggtgccggcgatgcccggcagccccgtggaggtcaagatccagtcccgcagctccccgcccaccatgccgcccctgccgcccatcaaccccgggggcccccggcccgtgagcttcacccccacggccctgtccaacgggatcaaccactccccgcccaccctcaacggcgcccccagcccgccccagcgcttcagcaacggccccgcctccagcacctccagcgccctgaccaaccagcagctgcccgcgacgtgcggggcccggcagctctccaagctgaagcgcttcctgaccaccctccagcagttcggcaacgacatcagccccgagatcggggagaaggtgcggaccctggtcctggccctcgtgaactccacggtgaccatcgaggagttccactgcaagctgcaggaggccaccaacttccccctgcgccccttcgtcatccccttcctcaaggcgaacctgccgctgctccagcgggagctgctgcactgcgcccgcgccgccaagcagacccccagccagtacctcgcccagcacgagcacctcctgctgaacacgtccatcgcgagccccgccgacagctccgagctgctgatggaggtgcacggcaacgggaagcggcccagcccggagcgccgggaggagaactccttcgaccgcgacaccatcgcccccgagcccccggccaagcgggtgtgcaccatcagccccgcgccccgccactcccccgccctcaccgtcccgctgatgaaccccggcggccagttccaccccacgcccccgcccctgcagcactacaccctcgaggacatcgccaccagccacctgtaccgggagcccaacaagatgctggagcaccgcgaggtgcgggaccgccaccactccctcgggctgaacggcgggtaccaggacgagctggtggaccaccggctcaccgagcgcgagtgggccgacgagtggaagcacctggaccacgccctgaactgcatcatggagatggtcgagaagacgcgccggagcatggccgtgctccgccggtgccaggagtccgaccgcgaggagctgaactactggaagcggcgctacaacgagaacaccgagctgcggaagaccggcaccgagctcgtgagccgccagcactcccccggcagcgcggactccctgagcaacgactcccagcgggagttcaacagccgcccggggacgggctacgtccccgtggagttctggaagaagaccgaggaggccgtgaacaaggtcaagatccaggccatgtccgaggtgcagaaggccgtggccgaggcggagcagaaggccttcgaggtcatcgccaccgagcgggcccgcatggagcagaccatcgcggacgtgaagcggcaggccgccgaggacgccttcctggtcatcaacgagcaggaggagagcacggagaactgctggaactgcgggcgcaaggcctccgagacctgcagcggctgcaacatcgcgcggtactgcgggagcttctgccagcacaaggactgggagcgccaccaccggctctgcggccagaacctgcacggccagtccccgcacgggcagggccgccccctgctgcccgtggggcggggcagctccgcccgcagcgccgactgctccgtgcccagccccgccctcgacaagacctccgccaccacgagccgctccagcacccccgcgtccgtcaccgccatcgacaccaacgggctgtga

SEQ ID NO: 412 - RNA, 1845 nt, synthetic construct
  misc_feature 1..1845: note = Homo sapiens__O43439-4__RUNX1T1b CDS opt1
  source 1..1845: mol_type = other RNA
atgggcttccaccacgtggggcaggcccgcctggagctcctgaccagcggcgacctgcccgccctcgcgtcccagcgggccgggatcaccgtcggcccggagaagcgcgtgcccgccatgcccgggagccccgtggaggtcaagatccagtcccggagctccccgcccacgatgccgcccctgccgcccatcaaccccggcggcccccgccccgtgagcttcacccccaccgccctgtccaacgggatcaaccacagcccgcccaccctcaacggcgccccctccccgccccagcggttcagcaacgggcccgcgtccagcacgtccagcgccctgaccaaccagcagctgcccgcgacctgcggcgcccgccagctctccaagctgaagcggttcctgaccacgctccagcagttcgggaacgacatcagccccgagatcggcgagaaggtgcgcaccctggtcctggccctcgtgaactccaccgtgaccatcgaggagttccactgcaagctgcaggaggccacgaacttccccctgcggcccttcgtcatcccgttcctcaaggccaacctgcccctgctccagcgcgagctgctgcactgcgcccgggccgcgaagcagacccccagccagtacctcgcccagcacgagcacctcctgctgaacacctccatcgccagccccgccgacagctccgagctgctgatggaggtgcacggcaacgggaagcgcccgagccccgagcggcgcgaggagaactccttcgaccgggacaccatcgcccccgagccgcccgcgaagcgcgtgtgcacgatcagccccgcgccccggcactccccggccctcaccgtccccctgatgaaccccggcgggcagttccaccccaccccgccgcccctgcagcactacaccctcgaggacatcgccacgagccacctgtaccgcgagcccaacaagatgctggagcaccgggaggtgcgcgaccggcaccactccctcggcctgaacggcgggtaccaggacgagctggtggaccaccgcctcaccgagcgcgagtgggccgacgagtggaagcacctggaccacgccctgaactgcatcatggagatggtcgagaagacccggcgcagcatggccgtgctccggcgctgccaggagtccgaccgggaggagctgaactactggaagcgccggtacaacgagaacaccgagctgcgcaagacgggcaccgagctcgtgagccggcagcactcccccgggagcgccgactccctgagcaacgactcccagcgcgagttcaacagccggcccggcaccgggtacgtccccgtggagttctggaagaagaccgaggaggccgtgaacaaggtcaagatccaggccatgtccgaggtgcagaaggcggtggccgaggccgagcagaaggccttcgaggtcatcgcgacggagcgcgcccggatggagcagaccatcgccgacgtgaagcgccaggccgccgaggacgcgttcctggtcatcaacgagcaggaggagagcaccgagaactgctggaactgcggccggaaggcctccgagacctgcagcggctgcaacatcgcccgctactgcgggagcttctgccagcacaaggactgggagcggcaccaccgcctgtgcggccagaacctccacgggcagagcccccacggccaggggcggccgctgctgcccgtgggccgcggctcctccgcccgcagcgccgactgctccgtgcccagccccgcgctcgacaagacgtccgccaccaccagccggtccagcaccccggcctccgtcacggccatcgacaccaacgggctgtga

SEQ ID NO: 413 - RNA, 1788 nt, synthetic construct
  misc_feature 1..1788: note = Homo sapiens__O43439-5__RUNX1T1b CDS opt1
  source 1..1788: mol_type = other RNA
atggtgggcgtccccggggccgccgcgttccagctgggcccggagaagcgcgtgcccgccatgcccgggagccccgtggaggtcaagatccagtcccggagctccccgcccaccatgccgcccctgccgcccatcaaccccggcgggccccgccccgtgagcttcacccccacggccctctccaacggcatcaaccacagcccgcccaccctgaacggcgccccctccccgccccagcggttcagcaacgggcccgcctccagcacctccagcgcgctcaccaaccagcagctgcccgccacgtgcggcgcccgccagctgtccaagctcaagcggttcctgaccaccctgcagcagttcgggaacgacatcagccccgagatcggcgagaaggtgcgcaccctcgtcctggccctggtgaactccacggtgaccatcgaggagttccactgcaagctccaggaggcgaccaacttccccctgcggcccttcgtcatcccgttcctgaaggccaacctccccctgctgcagcgcgagctcctgcactgcgcccgggccgccaagcagacccccagccagtacctggcgcagcacgagcacctcctgctgaacacgtccatcgccagccccgccgactccagcgagctcctgatggaggtgcacgggaacggcaagcgcccgagccccgagcggcgcgaggagaactccttcgaccgggacaccatcgcccccgagccgcccgccaagcgcgtgtgcaccatcagccccgcgccccggcactccccggccctgaccgtccccctcatgaaccccggcgggcagttccaccccacgccgccgcccctgcagcactacaccctggaggacatcgccaccagccacctctaccgcgagcccaacaagatgctggagcaccgggaggtgcgcgaccggcaccactccctgggcctcaacgggggctaccaggacgagctggtggaccaccgcctgaccgagcgggagtgggccgacgagtggaagcacctcgaccacgccctgaactgcatcatggagatggtcgagaagacgcgccgcagcatggcggtgctgcggcgctgccaggagtccgaccgggaggagctcaactactggaagcgccggtacaacgagaacaccgagctgcgcaagaccggcaccgagctggtgagccggcagcactcccccgggagcgccgactccctcagcaacgactcccagcgcgagttcaacagccggcccggcacggggtacgtccccgtggagttctggaagaagaccgaggaggccgtgaacaaggtcaagatccaggccatgtccgaggtgcagaaggccgtggcggaggccgagcagaaggccttcgaggtcatcgccaccgagcgcgcgcggatggagcagaccatcgccgacgtgaagcgccaggccgccgaggacgccttcctggtcatcaacgagcaggaggagagcacggagaactgctggaactgcggccggaaggcgtccgagacctgcagcgggtgcaacatcgcccgctactgcggctccttctgccagcacaaggactgggagcggcaccaccgcctgtgcggccagaacctccacgggcagagcccccacggccaggggcggccgctgctgcccgtgggccgcgggagctccgcccggagcgccgactgctccgtgcccagccccgccctggacaagacctccgcgaccacgagccgctccagcaccccggcctccgtcaccgccatcgacaccaacggcctctga

SEQ ID NO: 414 - RNA, 1728 nt, synthetic construct
  misc_feature 1..1728: note = Homo sapiens__O43439-2__RUNX1T1b CDS opt1
  source 1..1728: mol_type = other RNA
atgcccggcagcccggtggaggtcaagatccagtcccgcagctccccgcccaccatgccgcccctgccgcccatcaaccccgggggcccccggcccgtgagcttcacccccacggccctctccaacgggatcaaccactccccgcccaccctgaacggcgcccccagcccgccccagcgcttcagcaacgggcccgcgtccagcacctccagcgccctgaccaaccagcagctccccgccacgtgcggcgcccggcagctgtccaagctgaagcgcttcctcaccaccctgcagcagttcggcaacgacatcagccccgagatcggggagaaggtgcggaccctggtcctcgccctggtgaactccacggtgaccatcgaggagttccactgcaagctgcaggaggcgaccaacttccccctccgccccttcgtcatccccttcctgaaggccaacctgcccctcctgcagcgggagctgctccactgcgcccgcgccgcgaagcagacccccagccagtacctggcccagcacgagcacctcctgctgaacacgtccatcgccagcccggccgactccagcgagctgctcatggaggtgcacggcaacgggaagcggcccagccccgagcgccgggaggagaactccttcgaccgcgacaccatcgcccccgagccgcccgcgaagcgggtgtgcaccatcagccccgccccgcgccactcccccgccctgaccgtccccctgatgaaccccggcgggcagttccacccgacgcccccgcccctccagcactacaccctggaggacatcgccaccagccacctgtaccgggagcccaacaagatgctcgagcaccgcgaggtgcgggaccgccaccactccctgggcctgaacggcgggtaccaggacgagctcgtggaccaccggctgaccgagcgcgagtgggccgacgagtggaagcacctggaccacgcgctcaactgcatcatggagatggtcgagaagacgcggcgcagcatggccgtgctgcgccggtgccaggagtccgaccgcgaggagctgaactactggaagcggcgctacaacgagaacaccgagctccggaagaccggcaccgagctggtgagccgccagcactcccccgggagcgccgactccctgagcaacgactcccagcgggagttcaacagccgccccggcacgggctacgtccccgtggagttctggaagaagaccgaggaggccgtgaacaaggtcaagatccaggccatgtccgaggtgcagaaggcggtggccgaggccgagcagaaggccttcgaggtcatcgccaccgagcgggcgcgcatggagcagaccatcgccgacgtgaagcggcaggccgccgaggacgcgttcctcgtgatcaacgagcaggaggagagcacggagaactgctggaactgcgggcgcaaggcctccgagacctgcagcggctgcaacatcgcccggtactgcgggtccttctgccagcacaaggactgggagcgccaccaccggctgtgcggccagaacctgcacgggcagagcccgcacggccagggccgccccctcctgcccgtcgggcggggcagctccgcccgcagcgccgactgctccgtgcccagcccggcgctggacaagacctccgccaccacgagccggtccagcacccccgcctccgtcaccgccatcgacaccaacgggctgtga

SEQ ID NO: 415 - RNA, 48 nt, synthetic construct; identical to SEQ ID NO: 291
  misc_feature 1..48: note = Homo sapiens____RUNX1T1b(short) CDS opt1
  source 1..48: mol_type = other RNA

SEQ ID NO: 416 - RNA, 1749 nt, synthetic construct
  misc_feature 1..1749: note = Homo sapiens__O43439-1__RUNX1T1b(22-604) CDS opt1
  source 1..1749: mol_type = other RNA
gggcccgagaagcgggtgccggcgatgcccggcagccccgtggaggtcaagatccagtcccgcagctccccgcccaccatgccgcccctgccgcccatcaaccccgggggcccccggcccgtgagcttcacccccacggccctgtccaacgggatcaaccactccccgcccaccctcaacggcgcccccagcccgccccagcgcttcagcaacggccccgcctccagcacctccagcgccctgaccaaccagcagctgcccgcgacgtgcggggcccggcagctctccaagctgaagcgcttcctgaccaccctccagcagttcggcaacgacatcagccccgagatcggggagaaggtgcggaccctggtcctggccctcgtgaactccacggtgaccatcgaggagttccactgcaagctgcaggaggccaccaacttccccctgcgccccttcgtcatccccttcctcaaggcgaacctgccgctgctccagcgggagctgctgcactgcgcccgcgccgccaagcagacccccagccagtacctcgcccagcacgagcacctcctgctgaacacgtccatcgcgagccccgccgacagctccgagctgctgatggaggtgcacggcaacgggaagcggcccagcccggagcgccgggaggagaactccttcgaccgcgacaccatcgcccccgagcccccggccaagcgggtgtgcaccatcagccccgcgccccgccactcccccgccctcaccgtcccgctgatgaaccccggcggccagttccaccccacgcccccgcccctgcagcactacaccctcgaggacatcgccaccagccacctgtaccgggagcccaacaagatgctggagcaccgcgaggtgcgggaccgccaccactccctcgggctgaacggcgggtaccaggacgagctggtggaccaccggctcaccgagcgcgagtgggccgacgagtggaagcacctggaccacgccctgaactgcatcatggagatggtcgagaagacgcgccggagcatggccgtgctccgccggtgccaggagtccgaccgcgaggagctgaactactggaagcggcgctacaacgagaacaccgagctgcggaagaccggcaccgagctcgtgagccgccagcactcccccggcagcgcggactccctgagcaacgactcccagcgggagttcaacagccgcccggggacgggctacgtccccgtggagttctggaagaagaccgaggaggccgtgaacaaggtcaagatccaggccatgtccgaggtgcagaaggccgtggccgaggcggagcagaaggccttcgaggtcatcgccaccgagcgggcccgcatggagcagaccatcgcggacgtgaagcggcaggccgccgaggacgccttcctggtcatcaacgagcaggaggagagcacggagaactgctggaactgcgggcgcaaggcctccgagacctgcagcggctgcaacatcgcgcggtactgcgggagcttctgccagcacaaggactgggagcgccaccaccggctctgcggccagaacctgcacggccagtccccgcacgggcagggccgccccctgctgcccgtggggcggggcagctccgcccgcagcgccgactgctccgtgcccagccccgccctcgacaagacctccgccaccacgagccgctccagcacccccgcgtccgtcaccgccatcgacaccaacgggctg

SEQ ID NO: 417 - RNA, 1836 nt, synthetic construct
  misc_feature 1..1836: note = Homo sapiens____CBFbeta(1-165)_SMMHC(1527-1972) CDS opt1
  source 1..1836: mol_type = other RNA
atgccccgcgtggtcccggaccagcggagcaagttcgagaacgaggagttcttccgcaagctgtcccgggagtgcgagatcaagtacaccggcttccgcgaccggccccacgaggagcgccaggcccggttccagaacgcctgccgcgacgggcggagcgagatcgcgttcgtggccaccggcacgaacctctccctgcagttcttccccgccagctggcagggggagcagcgccagaccccctcccgggagtacgtggacctggagcgcgaggccggcaaggtctacctcaaggccccgatgatcctgaacggggtgtgcgtgatctggaagggctggatcgacctgcagcggctcgacggcatggggtgcctggagttcgacgaggagcgcgcgcagcaggaggacgccctggcccagcaggccttcgaggaggcgcggcgccggacccgcgagttcgaggaccgggaccgcagccaccgggaggagatggaggtgcacgagctggagaagtccaagcgcgccctcgagacccagatggaggagatgaagacccagctggaggagctggaggacgagctccaggccacggaggacgcgaagctgcggctggaggtcaacatgcaggccctcaagggccagttcgagcgcgacctgcaggcccgggacgagcagaacgaggagaagcgccggcagctgcagcgccagctccacgagtacgagaccgagctggaggacgagcggaagcagcgcgccctggccgcggccgccaagaagaagctcgagggggacctgaaggacctggagctccaggccgacagcgcgatcaagggccgggaggaggccatcaagcagctgcgcaagctgcaggcccagatgaaggacttccagcgggagctcgaggacgcccgcgccagccgggacgagatcttcgcgaccgccaaggagaacgagaagaaggccaagtccctggaggccgacctgatgcagctccaggaggacctggccgcggccgagcgcgcccggaagcaggccgacctggagaaggaggagctcgccgaggagctggcgagctccctgagcgggcgcaacgccctccaggacgagaagcggcgcctggaggcccggatcgcccagctggaggaggagctcgaggaggagcagggcaacatggaggccatgtccgaccgcgtgcggaaggcgacccagcaggccgagcagctgagcaacgagctggccacggagcgctccaccgcccagaagaacgagagcgcgcgccagcagctcgagcggcagaacaaggagctgcgctccaagctgcacgagatggagggggccgtgaagtccaagttcaagagcaccatcgccgccctcgaggccaagatcgcgcagctggaggagcaggtcgagcaggaggcccgggagaagcaggccgccaccaagagcctgaagcagaaggacaagaagctcaaggagatcctgctccaggtggaggacgagcgcaagatggccgagcagtacaaggagcaggcggagaagggcaacgcccgggtgaagcagctgaagcgccagctggaggaggccgaggaggagtcccagcggatcaacgccaaccgccggaagctgcagcgcgagctcgacgaggccacggagagcaacgaggcgatgggccgggaggtcaacgccctgaagtccaagctgcgccgggggaacgagaccagcttcgtgccctcccgccggagcggcgggcgccgggtgatcgagaacgccgacggcagcgaggaggagaccgacacccgcgacgccgacttcaacgggacgaaggcgtccgagtga

SEQ ID NO: 418 - RNA, 1551 nt, synthetic construct
  misc_feature 1..1551: note = Artificial____CBFbeta(1-165)_SMMHC(1527-1877) CDS opt1
  source 1..1551: mol_type = other RNA
atgccccgcgtggtcccggaccagcggagcaagttcgagaacgaggagttcttccgcaagctgtcccgggagtgcgagatcaagtacaccggcttccgcgaccggccccacgaggagcgccaggcccggttccagaacgcctgccgcgacgggcggagcgagatcgcgttcgtggccaccggcacgaacctctccctgcagttcttccccgccagctggcagggggagcagcgccagaccccctcccgggagtacgtggacctggagcgcgaggccggcaaggtctacctcaaggccccgatgatcctgaacggggtgtgcgtgatctggaagggctggatcgacctgcagcggctcgacggcatggggtgcctggagttcgacgaggagcgcgcgcagcaggaggacgccctggcccagcaggccttcgaggaggcgcggcgccggacccgcgagttcgaggaccgggaccgcagccaccgggaggagatggaggtgcacgagctggagaagtccaagcgcgccctcgagacccagatggaggagatgaagacccagctggaggagctggaggacgagctccaggccacggaggacgcgaagctgcggctggaggtcaacatgcaggccctcaagggccagttcgagcgcgacctgcaggcccgggacgagcagaacgaggagaagcgccggcagctgcagcgccagctccacgagtacgagaccgagctggaggacgagcggaagcagcgcgccctggccgcggccgccaagaagaagctcgagggggacctgaaggacctggagctccaggccgacagcgcgatcaagggccgggaggaggccatcaagcagctgcgcaagctgcaggcccagatgaaggacttccagcgggagctcgaggacgcccgcgccagccgggacgagatcttcgcgaccgccaaggagaacgagaagaaggccaagtccctggaggccgacctgatgcagctccaggaggacctggccgcggccgagcgcgcccggaagcaggccgacctggagaaggaggagctcgccgaggagctggcgagctccctgagcgggcgcaacgccctccaggacgagaagcggcgcctggaggcccggatcgcccagctggaggaggagctcgaggaggagcagggcaacatggaggccatgtccgaccgcgtgcggaaggcgacccagcaggccgagcagctgagcaacgagctggccacggagcgctccaccgcccagaagaacgagagcgcgcgccagcagctcgagcggcagaacaaggagctgcgctccaagctgcacgagatggagggggccgtgaagtccaagttcaagagcaccatcgccgccctcgaggccaagatcgcgcagctggaggagcaggtcgagcaggaggcccgggagaagcaggccgccaccaagagcctgaagcagaaggacaagaagctcaaggagatcctgctccaggtggaggacgagcgcaagatggccgagcagtacaaggagcaggcggagaagggcaacgcctga

SEQ ID NO: 419 - RNA, 612 nt, synthetic construct
  misc_feature 1..612: note = Artificial____CBFbeta(1-165)_Linker_Lifeact CDS opt1
  source 1..612: mol_type = other RNA
atgccccgcgtggtcccggaccagcggagcaagttcgagaacgaggagttcttccgcaagctgtcccgggagtgcgagatcaagtacaccggcttccgcgaccggccccacgaggagcgccaggcccggttccagaacgcctgccgcgacgggcggagcgagatcgcgttcgtggccaccggcacgaacctctccctgcagttcttccccgccagctggcagggggagcagcgccagaccccctcccgggagtacgtggacctggagcgcgaggccggcaaggtctacctcaaggccccgatgatcctgaacggggtgtgcgtgatctggaagggctggatcgacctgcagcggctcgacggcatggggtgcctggagttcgacgaggagcgcgcgcagcaggaggacgccctggcccagcaggccttcgaggaggcgcggcgccggacccgcgagttcgaggaccgggaccgcagccaccgggaggagatggagggcgggagcggcgggtccggcgggagcggcggctccgggggcgggggcgtggccgacctgatcaagaagttcgagagcatctccaaggaggagggggacccgcccgtcgccacctga

SEQ ID NO: 420 - RNA, 579 nt, synthetic construct
  misc_feature 1..579: note = Artificial____CBFbeta(1-165)_HIF1alpha(549-575) CDS opt1
  source 1..579: mol_type = other RNA
atgccccgcgtggtcccggaccagcggagcaagttcgagaacgaggagttcttccgcaagctgtcccgggagtgcgagatcaagtacaccggcttccgcgaccggccccacgaggagcgccaggcccggttccagaacgcctgccgcgacgggcggagcgagatcgcgttcgtggccaccggcacgaacctctccctgcagttcttccccgccagctggcagggggagcagcgccagaccccctcccgggagtacgtggacctggagcgcgaggccggcaaggtctacctcaaggccccgatgatcctgaacggggtgtgcgtgatctggaagggctggatcgacctgcagcggctcgacggcatggggtgcctggagttcgacgaggagcgcgcgcagcaggaggacgccctggcccagcaggccttcgaggaggcgcggcgccggacccgcgagttcgaggaccgggaccgcagccaccgggaggagatggagcccttcagcacccaggacaccgacctggacctcgagatgctggccccgtacatccccatggacgacgacttccagctgcgctga

SEQ ID NO: 421 - RNA, 624 nt, synthetic construct
  misc_feature 1..624: note Artificial____CBFbeta(1-165)_Linker_HIF1alpha(549-575) CDS opt1
  source 1..624: mol_type = other RNA
atgccccgcgtggtcccggaccagcggagcaagttcgagaacgaggagttcttccgcaagctgtcccgggagtgcgagatcaagtacaccggcttccgcgaccggccccacgaggagcgccaggcccggttccagaacgcctgccgcgacgggcggagcgagatcgcgttcgtggccaccggcacgaacctctccctgcagttcttccccgccagctggcagggggagcagcgccagaccccctcccgggagtacgtggacctggagcgcgaggccggcaaggtctacctcaaggccccgatgatcctgaacggggtgtgcgtgatctggaagggctggatcgacctgcagcggctcgacggcatggggtgcctggagttcgacgaggagcgcgcgcagcaggaggacgccctggcccagcaggccttcgaggaggcgcggcgccggacccgcgagttcgaggaccgggaccgcagccaccgggaggagatggagggcgggagcggcgggtccggcgggagcggcggctccgggggcgggcccttcagcacccaggacaccgacctggacctcgagatgctggccccgtacatccccatggacgacgacttccagctgcgctga

SEQ ID NO: 422 - RNA, 2259 nt, synthetic construct
  misc_feature 1..2259: note = Artificial____RUNX1(1-177)_N_RUNX1T1a(31-604) CDS opt1
  source 1..2259: mol_type = other RNA
atgcgcatccccgtggacgccagcacctcccggcgcttcaccccgcccagcacggccctgtcccccggcaagatgagcgaggcgctccccctgggggccccggacgccggcgccgccctggcggggaagctccggtccggcgaccgcagcatggtcgaggtgctggccgaccaccccggggagctggtgcggaccgactcccccaacttcctctgcagcgtcctgcccacccactggcgctgcaacaagaccctgccgatcgccttcaaggtggtggccctcggcgacgtccccgacggcacgctggtgaccgtgatggcggggaacgacgagaactactccgccgagctgcggaacgccaccgccgccatgaagaaccaggtcgcgcgcttcaacgacctccggttcgtgggccgcagcgggcggggcaagtccttcaccctgacgatcaccgtgttcaccaacccgccccaggtcgccacctaccaccgcgccatcaagatcacggtggacgggccccgggagccccgcaaccggaccgagaagcacagcacgatgcccgactccccggtggacgtgaagacccagagccgcctgaccccgcccaccatgcccccgccgcccacgacccagggcgcgccccggacctccagcttcacccccacgaccctgaccaacgggacctcccacagccccacggccctcaacggcgccccctccccgcccaacgggttcagcaacggcccctccagctccagctccagctccctggccaaccagcagctgccgcccgcctgcggcgcccgccagctcagcaagctgaagcggttcctgaccaccctccagcagttcgggaacgacatctcccccgagatcggcgagcgcgtccggaccctggtgctggggctcgtgaacagcacgctgaccatcgaggagttccacagcaagctgcaggaggcgaccaacttccccctccgccccttcgtcatccccttcctgaaggccaacctgcccctcctgcagcgggagctgctccactgcgcccgcctggccaagcagaaccccgcgcagtacctggcccagcacgagcagctcctgctggacgcctccaccacgagccccgtggactccagcgagctcctgctggacgtgaacgagaacggcaagcggcgcacccccgaccggaccaaggagaacgggttcgaccgcgagccgctccactccgagcaccccagcaagcggccctgcaccatctcccccggccagcgctacagcccgaacaacggcctgtcctaccagcccaacgggctgccccacccgacgcccccgccgccccagcactaccggctcgacgacatggccatcgcccaccactaccgcgacagctaccggcacccctcccaccgcgacctgcgcgaccggaaccgccccatgggcctgcacgggacccggcaggaggagatgatcgaccaccgcctcaccgaccgggagtgggcggaggagtggaagcacctggaccacctcctgaactgcatcatggacatggtcgagaagacccgccggagcctgacggtgctgcgccggtgccaggaggccgaccgcgaggagctcaactactggatccggcgctactccgacgccgaggacctgaagaagggcggcgggagctccagctcccacagccggcagcagtcccccgtgaaccccgaccccgtcgccctggacgcccaccgcgagttcctccaccggcccgcgagcggctacgtgcccgaggagatctggaagaaggccgaggaggccgtgaacgaggtcaagcgccaggccatgaccgagctgcagaaggccgtgagcgaggcggagcggaaggcccacgacatgatcaccaccgagcgcgccaagatggagcggacggtggccgaggccaagcgccaggcggccgaggacgccctggccgtcatcaaccagcaggaggactccagcgagtcctgctggaactgcgggcgcaaggcgagcgagacctgctccggctgcaacaccgcccggtactgcgggagcttctgccagcacaaggactgggagaagcaccaccacatctgcggccagaccctgcaggcccagcagcagggcgacacgccggccgtgtccagctccgtgacccccaacagcggggccggctcccccatggacacgcccccggcggccacgccccgcagcaccacccccgggaccccctccaccatcgagaccaccccgcggtga

SEQ ID NO: 423 - RNA, 774 nt, synthetic construct
  misc_feature 1..774: note = Artificial____RUNX1(1-241)_RUNX1T1b(short) CDS opt1
  source 1..774: mol_type = other RNA
atgcgcatccccgtggacgccagcacctcccggcgcttcaccccgcccagcacggccctgtcccccggcaagatgagcgaggcgctccccctgggggccccggacgccggcgccgccctggcggggaagctccggtccggcgaccgcagcatggtcgaggtgctggccgaccaccccggggagctggtgcggaccgactcccccaacttcctctgcagcgtcctgcccacccactggcgctgcaacaagaccctgccgatcgccttcaaggtggtggccctcggcgacgtccccgacggcacgctggtgaccgtgatggcggggaacgacgagaactactccgccgagctgcggaacgccaccgccgccatgaagaaccaggtcgcgcgcttcaacgacctccggttcgtgggccgcagcgggcggggcaagtccttcaccctgacgatcaccgtgttcaccaacccgccccaggtcgccacctaccaccgcgccatcaagatcacggtggacgggccccgggagccccgccggcaccgccagaagctggacgaccagaccaagcccggcagcctctccttcagcgagcggctgtccgagctggagcagctccgccggaccgccatgcgcgtgagcccccaccacccggcccccacccccaacccccgggcgtccctgaaccacagcacggccttcaacccgcagccccagtcccagatgcaggaggtgggcttctgccacgtcgcccaggtggggctgaagctcctgggctga

SEQ ID NO: 424 - RNA, 2478 nt, synthetic construct
  misc_feature 1..2478: note = Artificial____RUNX1(1-241)_V_RUNX1T1b(22-604) CDS opt1
  source 1..2478: mol_type = other RNA
atgcgcatccccgtggacgccagcacctcccggcgcttcaccccgcccagcacggccctgtcccccggcaagatgagcgaggcgctccccctgggggccccggacgccggcgccgccctggcggggaagctccggtccggcgaccgcagcatggtcgaggtgctggccgaccaccccggggagctggtgcggaccgactcccccaacttcctctgcagcgtcctgcccacccactggcgctgcaacaagaccctgccgatcgccttcaaggtggtggccctcggcgacgtccccgacggcacgctggtgaccgtgatggcggggaacgacgagaactactccgccgagctgcggaacgccaccgccgccatgaagaaccaggtcgcgcgcttcaacgacctccggttcgtgggccgcagcgggcggggcaagtccttcaccctgacgatcaccgtgttcaccaacccgccccaggtcgccacctaccaccgcgccatcaagatcacggtggacgggccccgggagccccgccggcaccgccagaagctggacgaccagaccaagcccggcagcctctccttcagcgagcggctgtccgagctggagcagctccgccggaccgccatgcgcgtgagcccccaccacccggcccccacccccaacccccgggcgtccctgaaccacagcacggccttcaacccgcagccccagtcccagatgcaggtggggcccgagaagcgggtgccggcgatgcccggcagccccgtggaggtcaagatccagtcccgcagctccccgcccaccatgccgcccctgccgcccatcaaccccgggggcccccggcccgtgagcttcacccccacggccctgtccaacgggatcaaccactccccgcccaccctcaacggcgcccccagcccgccccagcgcttcagcaacggccccgcctccagcacctccagcgccctgaccaaccagcagctgcccgcgacgtgcggggcccggcagctctccaagctgaagcgcttcctgaccaccctccagcagttcggcaacgacatcagccccgagatcggggagaaggtgcggaccctggtcctggccctcgtgaactccacggtgaccatcgaggagttccactgcaagctgcaggaggccaccaacttccccctgcgccccttcgtcatccccttcctcaaggcgaacctgccgctgctccagcgggagctgctgcactgcgcccgcgccgccaagcagacccccagccagtacctcgcccagcacgagcacctcctgctgaacacgtccatcgcgagccccgccgacagctccgagctgctgatggaggtgcacggcaacgggaagcggcccagcccggagcgccgggaggagaactccttcgaccgcgacaccatcgcccccgagcccccggccaagcgggtgtgcaccatcagccccgcgccccgccactcccccgccctcaccgtcccgctgatgaaccccggcggccagttccaccccacgcccccgcccctgcagcactacaccctcgaggacatcgccaccagccacctgtaccgggagcccaacaagatgctggagcaccgcgaggtgcgggaccgccaccactccctcgggctgaacggcgggtaccaggacgagctggtggaccaccggctcaccgagcgcgagtgggccgacgagtggaagcacctggaccacgccctgaactgcatcatggagatggtcgagaagacgcgccggagcatggccgtgctccgccggtgccaggagtccgaccgcgaggagctgaactactggaagcggcgctacaacgagaacaccgagctgcggaagaccggcaccgagctcgtgagccgccagcactcccccggcagcgcggactccctgagcaacgactcccagcgggagttcaacagccgcccggggacgggctacgtccccgtggagttctggaagaagaccgaggaggccgtgaacaaggtcaagatccaggccatgtccgaggtgcagaaggccgtggccgaggcggagcagaaggccttcgaggtcatcgccaccgagcgggcccgcatggagcagaccatcgcggacgtgaagcggcaggccgccgaggacgccttcctggtcatcaacgagcaggaggagagcacggagaactgctggaactgcgggcgcaaggcctccgagacctgcagcggctgcaacatcgcgcggtactgcgggagcttctgccagcacaaggactgggagcgccaccaccggctctgcggccagaacctgcacggccagtccccgcacgggcagggccgccccctgctgcccgtggggcggggcagctccgcccgcagcgccgactgctccgtgcccagccccgccctcgacaagacctccgccaccacgagccgctccagcacccccgcgtccgtcaccgccatcgacaccaacgggctgtga

SEQ ID NO: 425 - RNA, 2478 nt, synthetic construct
  misc_feature 1..2478: note = Artificial____RUNX1(1-241)_I_RUNX1T1b(22-604) CDS opt1
  source 1..2478: mol_type = other RNA
atgcgcatccccgtggacgccagcacctcccggcgcttcaccccgcccagcacggccctgtcccccggcaagatgagcgaggcgctccccctgggggccccggacgccggcgccgccctggcggggaagctccggtccggcgaccgcagcatggtcgaggtgctggccgaccaccccggggagctggtgcggaccgactcccccaacttcctctgcagcgtcctgcccacccactggcgctgcaacaagaccctgccgatcgccttcaaggtggtggccctcggcgacgtccccgacggcacgctggtgaccgtgatggcggggaacgacgagaactactccgccgagctgcggaacgccaccgccgccatgaagaaccaggtcgcgcgcttcaacgacctccggttcgtgggccgcagcgggcggggcaagtccttcaccctgacgatcaccgtgttcaccaacccgccccaggtcgccacctaccaccgcgccatcaagatcacggtggacgggccccgggagccccgccggcaccgccagaagctggacgaccagaccaagcccggcagcctctccttcagcgagcggctgtccgagctggagcagctccgccggaccgccatgcgcgtgagcccccaccacccggcccccacccccaacccccgggcgtccctgaaccacagcacggccttcaacccgcagccccagtcccagatgcagatcgggcccgagaagcgggtgccggcgatgcccggcagccccgtggaggtcaagatccagtcccgcagctccccgcccaccatgccgcccctgccgcccatcaaccccgggggcccccggcccgtgagcttcacccccacggccctgtccaacgggatcaaccactccccgcccaccctcaacggcgcccccagcccgccccagcgcttcagcaacggccccgcctccagcacctccagcgccctgaccaaccagcagctgcccgcgacgtgcggggcccggcagctctccaagctgaagcgcttcctgaccaccctccagcagttcggcaacgacatcagccccgagatcggggagaaggtgcggaccctggtcctggccctcgtgaactccacggtgaccatcgaggagttccactgcaagctgcaggaggccaccaacttccccctgcgccccttcgtcatccccttcctcaaggcgaacctgccgctgctccagcgggagctgctgcactgcgcccgcgccgccaagcagacccccagccagtacctcgcccagcacgagcacctcctgctgaacacgtccatcgcgagccccgccgacagctccgagctgctgatggaggtgcacggcaacgggaagcggcccagcccggagcgccgggaggagaactccttcgaccgcgacaccatcgcccccgagcccccggccaagcgggtgtgcaccatcagccccgcgccccgccactcccccgccctcaccgtcccgctgatgaaccccggcggccagttccaccccacgcccccgcccctgcagcactacaccctcgaggacatcgccaccagccacctgtaccgggagcccaacaagatgctggagcaccgcgaggtgcgggaccgccaccactccctcgggctgaacggcgggtaccaggacgagctggtggaccaccggctcaccgagcgcgagtgggccgacgagtggaagcacctggaccacgccctgaactgcatcatggagatggtcgagaagacgcgccggagcatggccgtgctccgccggtgccaggagtccgaccgcgaggagctgaactactggaagcggcgctacaacgagaacaccgagctgcggaagaccggcaccgagctcgtgagccgccagcactcccccggcagcgcggactccctgagcaacgactcccagcgggagttcaacagccgcccggggacgggctacgtccccgtggagttctggaagaagaccgaggaggccgtgaacaaggtcaagatccaggccatgtccgaggtgcagaaggccgtggccgaggcggagcagaaggccttcgaggtcatcgccaccgagcgggcccgcatggagcagaccatcgcggacgtgaagcggcaggccgccgaggacgccttcctggtcatcaacgagcaggaggagagcacggagaactgctggaactgcgggcgcaaggcctccgagacctgcagcggctgcaacatcgcgcggtactgcgggagcttctgccagcacaaggactgggagcgccaccaccggctctgcggccagaacctgcacggccagtccccgcacgggcagggccgccccctgctgcccgtggggcggggcagctccgcccgcagcgccgactgctccgtgcccagccccgccctcgacaagacctccgccaccacgagccgctccagcacccccgcgtccgtcaccgccatcgacaccaacgggctgtga

SEQ ID NO: 426 - RNA, 549 nt, synthetic construct; identical to SEQ ID NO: 364
  misc_feature 1..549: note = Homo sapiens__Q13951-1__CBFbeta CDS opt1
  source 1..549: mol_type = other RNA

SEQ ID NO: 427 - RNA, 672 nt, synthetic construct; identical to SEQ ID NO: 365
  misc_feature 1..672: note = Homo sapiens__A0A494C0A9__CBFbeta CDS opt1
  source 1..672: mol_type = other RNA

SEQ ID NO: 428 - RNA, 609 nt, synthetic construct; identical to SEQ ID NO: 366
  misc_feature 1..609: note = Homo sapiens__J3KRT0__CBFbeta CDS opt1
  source 1..609: mol_type = other RNA

SEQ ID NO: 429 - RNA, 564 nt, synthetic construct; identical to SEQ ID NO: 367
  misc_feature 1..564: note = Homo sapiens__Q13951-2__CBFbeta CDS opt1
  source 1..564: mol_type = other RNA

SEQ ID NO: 430 - RNA, 423 nt, synthetic construct; identical to SEQ ID NO: 368
  misc_feature 1..423: note = Homo sapiens__Q13951-1__CBFbeta(1-141) CDS opt1
  source 1..423: mol_type = other RNA

SEQ ID NO: 431 - RNA, 495 nt, synthetic construct; identical to SEQ ID NO: 369
  misc_feature 1..495: note = Homo sapiens__Q13951-1__CBFbeta(1-165) CDS opt1
  source 1..495: mol_type = other RNA

SEQ ID NO: 432 - RNA, 5919 nt, synthetic construct
  misc_feature 1..5919: note = Homo sapiens__P35749-1__SMMHC CDS opt1
  source 1..5919: mol_type = other RNA
atggcccagaagggccagctgagcgacgacgagaagttcctcttcgtggacaagaacttcatcaactcccccgtcgcccaggcggactgggccgccaagcgcctggtgtgggtgccgagcgagaagcaggggttcgaggccgcctccatcaaggaggagaagggcgacgaggtcgtggtggagctggtcgagaacgggaagaaggtgaccgtgggcaaggacgacatccagaagatgaacccgcccaagttcagcaaggtcgaggacatggcggagctgacctgcctgaacgaggcctccgtgctgcacaacctccgggagcgctacttcagcgggctgatctacacgtactccggcctgttctgcgtggtcgtgaacccctacaagcacctccccatctacagcgagaagatcgtggacatgtacaagggcaagaagcggcacgagatgccgccccacatctacgccatcgccgacaccgcgtaccgctccatgctgcaggaccgggaggaccagagcatcctgtgcaccggggagtccggcgccgggaagaccgagaacacgaagaaggtcatccagtacctcgccgtggtggccagctcccacaagggcaagaaggacaccagcatcaccggggagctggagaagcagctgctccaggccaaccccatcctggaggcgttcggcaacgccaagaccgtcaagaacgacaactccagccgcttcggcaagttcatccggatcaacttcgacgtgacggggtacatcgtgggcgccaacatcgagacctacctgctcgagaagtcccgcgccatccggcaggcccgcgacgagcggaccttccacatcttctactacatgatcgcgggggccaaggagaagatgcgcagcgacctgctgctcgagggcttcaacaactacaccttcctgtccaacggcttcgtccccatccccgccgcccaggacgacgagatgttccaggagacggtggaggccatggcgatcatggggttcagcgaggaggagcagctgagcatcctcaaggtggtctccagcgtgctgcagctgggcaacatcgtcttcaagaaggagcggaacaccgaccaggcctccatgcccgacaacaccgccgcccagaaggtgtgccacctcatggggatcaacgtgaccgacttcacgcgcagcatcctgacgccccggatcaaggtcggccgcgacgtggtgcagaaggcccagaccaaggagcaggcggacttcgccgtcgaggccctggccaaggcgacctacgagcgcctcttccggtggatcctgacccgggtgaacaaggccctggacaagacccaccgccagggggcctccttcctcggcatcctggacatcgccggcttcgagatcttcgaggtgaacagcttcgagcagctgtgcatcaactacaccaacgagaagctccagcagctgttcaaccacaccatgttcatcctggagcaggaggagtaccagcgggaggggatcgagtggaacttcatcgacttcggcctcgacctgcagccgtgcatcgagctgatcgagcgccccaacaacccgcccggggtcctcgccctgctggacgaggagtgctggttccccaaggcgacggacaagtccttcgtggagaagctctgcaccgagcagggcagccaccccaagttccagaagcccaagcagctgaaggacaagaccgagttctccatcatccactacgccgggaaggtggactacaacgccagcgcctggctgaccaagaacatggaccccctgaacgacaacgtcacgtccctcctgaacgccagctccgacaagttcgtggcggacctgtggaaggacgtggaccgcatcgtcggcctcgaccagatggccaagatgaccgagagctccctgccgagcgcctccaagaccaagaagggcatgttccggaccgtggggcagctgtacaaggagcagctcggcaagctgatgacgaccctgcgcaacaccacccccaacttcgtgcggtgcatcatccccaaccacgagaagcgcagcgggaagctcgacgccttcctggtcctggagcagctccggtgcaacggcgtgctggaggggatccgcatctgccggcagggcttccccaaccgcatcgtgttccaggagttccggcagcgctacgagatcctggccgcgaacgccatcccgaagggcttcatggacgggaagcaggcctgcatcctcatgatcaaggccctggagctggaccccaacctctaccggatcggccagtccaagatcttcttccgcacgggggtcctggcgcacctggaggaggagcgggacctcaagatcaccgacgtgatcatggccttccaggccatgtgccgcggctacctggcccggaaggccttcgcgaagcgccagcagcagctgaccgccatgaaggtgatccagcggaactgcgccgcctacctcaagctgcgcaactggcagtggtggcggctgttcaccaaggtcaagcccctcctccaggtgacccgccaggaggaggagatgcaggccaaggaggacgagctgcagaagacgaaggagcgccagcagaaggcggagaacgagctcaaggagctggagcagaagcacagccagctgaccgaggagaagaacctcctgcaggagcagctgcaggccgagaccgagctctacgccgaggccgaggagatgcgggtgcgcctggccgcgaagaagcaggagctggaggagatcctccacgagatggaggcccggctggaggaggaggaggaccgcggccagcagctgcaggccgagcggaagaagatggcccagcagatgctcgacctggaggagcagctggaggaggaggaggcggcccgccagaagctccagctggagaaggtcaccgccgaggccaagatcaagaagctggaggacgagatcctcgtgatggacgaccagaacaacaagctgagcaaggagcggaagctgctcgaggagcgcatctccgacctgacgaccaacctggccgaggaggaggagaaggcgaagaacctcaccaagctgaagaacaagcacgagagcatgatctccgagctggaggtgcggctcaagaaggaggagaagtcccgccaggagctggagaagctgaagcggaagctcgagggggacgccagcgacttccacgagcagatcgccgacctgcaggcccagatcgccgagctgaagatgcagctcgcgaagaaggaggaggagctgcaggccgccctggcccgcctcgacgacgagatcgcccagaagaacaacgcgctgaagaagatccgggagctggagggccacatcagcgacctccaggaggacctggactccgagcgcgccgcccggaacaaggccgagaagcagaagcgcgacctgggggaggagctcgaggccctgaagaccgagctggaggacacgctcgacagcaccgcgacccagcaggagctgcgggccaagcgcgagcaggaggtcaccgtgctgaagaaggccctcgacgaggagacgcggtcccacgaggcccaggtgcaggagatgcgccagaagcacgcgcaggccgtcgaggagctgaccgagcagctggagcagttcaagcgggccaaggccaacctcgacaagaacaagcagaccctggagaaggagaacgccgacctggcgggcgagctccgcgtgctggggcaggccaagcaggaggtggagcacaagaagaagaagctggaggcccaggtccaggagctccagagcaagtgctccgacggcgagcgcgcccgggccgagctgaacgacaaggtgcacaagctgcagaacgaggtggagagcgtcaccggcatgctcaacgaggcggaggggaaggccatcaagctggccaaggacgtggcctccctgagctcccagctccaggacacgcaggagctgctgcaggaggagacccgccagaagctcaacgtgagcaccaagctgcggcagctggaggaggagcgcaactccctgcaggaccagctcgacgaggagatggaggccaagcagaacctggagcggcacatcagcaccctgaacatccagctcagcgactccaagaagaagctgcaggacttcgcgagcacggtcgaggccctggaggagggcaagaagcgcttccagaaggagatcgagaacctcacccagcagtacgaggagaaggccgccgcgtacgacaagctggagaagaccaagaaccggctgcagcaggagctcgacgacctggtggtggacctggacaaccagcgccagctcgtctccaacctggagaagaagcagcggaagttcgaccagctgctcgccgaggagaagaacatcagctccaagtacgccgacgagcgcgaccgggccgaggccgaggcgcgcgagaaggagaccaaggccctgagcctggcccgggccctcgaggaggccctggaggcgaaggaggagctggagcgcacgaacaagatgctcaaggccgagatggaggacctggtgtccagcaaggacgacgtggggaagaacgtccacgagctggagaagtccaagcgggccctcgagacccagatggaggagatgaagacccagctggaggagctggaggacgagctccaggccaccgaggacgccaagctgcgcctggaggtgaacatgcaggcgctcaagggccagttcgagcgggacctgcaggcccgcgacgagcagaacgaggagaagcggcgccagctgcagcgccagctccacgagtacgagacggagctggaggacgagcggaagcagcgcgccctggccgcggccgccaagaagaagctcgagggggacctgaaggacctggagctccaggccgacagcgccatcaagggccgggaggaggcgatcaagcagctgcgcaagctgcaggcccagatgaaggacttccagcgggagctcgaggacgcccgcgcctcccgggacgagatcttcgccaccgcgaaggagaacgagaagaaggccaagagcctggaggccgacctgatgcagctccaggaggacctggccgccgcggagcgcgcccggaagcaggccgacctggagaaggaggagctcgccgaggagctggcctccagcctgtccggccgcaacgcgctccaggacgagaagcggcgcctggaggcccggatcgcccagctggaggaggagctcgaggaggagcaggggaacatggaggccatgagcgaccgcgtgcggaaggcgacccagcaggccgagcagctgtccaacgagctggccaccgagcgcagcacggcccagaagaacgagtccgcccggcagcagctcgagcgccagaacaaggagctgcggagcaagctgcacgagatggagggcgcggtcaagagcaagttcaagtccaccatcgccgccctcgaggccaagatcgcccagctggaggagcaggtcgagcaggaggcgcgcgagaagcaggccgccaccaagagcctgaagcagaaggacaagaagctcaaggagatcctgctccaggtggaggacgagcggaagatggccgagcagtacaaggagcaggccgagaaggggaacgcgcgcgtgaagcagctgaagcgccagctggaggaggccgaggaggagtcccagcggatcaacgccaaccgccggaagctgcagcgcgagctcgacgaggccaccgagagcaacgaggcgatgggccgggaggtgaacgccctgaagtccaagctgcgccgggggaacgagacgagcttcgtcccctcccgccggagcggcggccgccgggtgatcgagaacgccgacgggtccgaggaggagaccgacacccgcgacgccgacttcaacggcaccaaggccagcgagtga

SEQ ID NO: 433 - RNA, 5940 nt, synthetic construct; identical to SEQ ID NO: 371
  misc_feature 1..5940: note = Homo sapiens__P35749-2__SMMHC CDS opt1
  source 1..5940: mol_type = other RNA

SEQ ID NO: 434 - RNA, 5838 nt, synthetic construct; identical to SEQ ID NO: 372
  misc_feature 1..5838: note = Homo sapiens__P35749-3__SMMHC CDS opt1
  source 1..5838: mol_type = other RNA

SEQ ID NO: 435 - RNA, 5817 nt, synthetic construct; identical to SEQ ID NO: 373
  misc_feature 1..5817: note = Homo sapiens__P35749-4__SMMHC CDS opt1
  source 1..5817: mol_type = other RNA

SEQ ID NO: 436 - RNA, 1338 nt, synthetic construct; identical to SEQ ID NO: 374
  misc_feature 1..1338: note = Homo sapiens__P35749-1__SMMHC(1527-1972) CDS opt1
  source 1..1338: mol_type = other RNA

SEQ ID NO: 437 - RNA, 1053 nt, synthetic construct
  misc_feature 1..1053: note = Homo sapiens__P35749-1__SMMHC(1527-1877) CDS opt1
  source 1..1053: mol_type = other RNA
gtgcacgagctggagaagtccaagcgcgccctggagacccagatggaggagatgaagacccagctggaggagctggaggacgagctccaggccacggaggacgcgaagctgcggctggaggtcaacatgcaggccctcaagggccagttcgagcgcgacctgcaggcccgggacgagcagaacgaggagaagcgccggcagctgcagcgccagctccacgagtacgagaccgagctggaggacgagcggaagcagcgcgccctggccgcggccgccaagaagaagctcgagggggacctgaaggacctggagctccaggccgacagcgcgatcaagggccgggaggaggccatcaagcagctgcgcaagctgcaggcccagatgaaggacttccagcgggagctcgaggacgcccgcgccagccgggacgagatcttcgcgaccgccaaggagaacgagaagaaggccaagtccctggaggccgacctgatgcagctccaggaggacctggccgcggccgagcgcgcccggaagcaggccgacctggagaaggaggagctcgccgaggagctggcgagctccctgagcgggcgcaacgccctccaggacgagaagcggcgcctggaggcccggatcgcccagctggaggaggagctcgaggaggagcagggcaacatggaggccatgtccgaccgcgtgcggaaggcgacccagcaggccgagcagctgagcaacgagctggccacggagcgctccaccgcccagaagaacgagagcgcgcgccagcagctcgagcggcagaacaaggagctgcgctccaagctgcacgagatggagggggccgtgaagtccaagttcaagagcaccatcgccgccctcgaggccaagatcgcgcagctggaggagcaggtcgagcaggaggcccgggagaagcaggccgccaccaagagcctgaagcagaaggacaagaagctcaaggagatcctgctccaggtggaggacgagcgcaagatggccgagcagtacaaggagcaggcggagaagggcaacgcc

SEQ ID NO: 438 - RNA, 492 nt, synthetic construct
  misc_feature 1..492: note = Homo sapiens__P35749-1__SMMHC(1809-1972) CDS opt1
  source 1..492: mol_type = other RNA
aagagcaagttcaagtccaccatcgccgccctggaggcgaagatcgcccagctcgaggagcaggtcgagcaggaggcccgcgagaagcaggccgccaccaagagcctgaagcagaaggacaagaagctgaaggagatcctcctccaggtggaggacgagcggaagatggcggagcagtacaaggagcaggccgagaagggcaacgcccgcgtgaagcagctgaagcggcagctggaggaggccgaggaggagtcccagcgcatcaacgcgaaccggcgcaagctgcagcgggagctggacgaggccacggagagcaacgaggccatggggcgcgaggtgaacgccctcaagtccaagctgcggcgcggcaacgagaccagcttcgtcccctcccggcgcagcgggggccggcgcgtgatcgagaacgccgacgggtccgaggaggagaccgacacccgggacgcggacttcaacggcacgaaggccagcgag

SEQ ID NO: 439 - RNA, 207 nt, synthetic construct
  misc_feature 1..207: note = Homo sapiens__P35749-1__SMMHC(1809-1877) CDS opt1
  source 1..207: mol_type = other RNA
aagagcaagttcaagtccaccatcgccgccctggaggcgaagatcgcccagctggaggagcaggtcgagcaggaggcccgcgagaagcaggccgccaccaagagcctgaagcagaaggacaagaagctgaaggagatcctcctccaggtggaggacgagcggaagatggcggagcagtacaaggagcaggccgagaagggcaacgcc

SEQ ID NO: 440 - RNA, 69 nt, synthetic construct; identical to SEQ ID NO: 316
  misc_feature 1..69: note = Artificial____Lifeact CDS opt1
  source 1..69: mol_type = other RNA

SEQ ID NO: 441 - RNA, 51 nt, synthetic construct; identical to SEQ ID NO: 255
  misc_feature 1..51: note = Saccharomyces cerevisiae S288C__NP_014882.4__Lifeact(1-17) CDS opt1
  source 1..51: mol_type = other RNA

SEQ ID NO: 442 - RNA, 2481 nt, synthetic construct; identical to SEQ ID NO: 380
  misc_feature 1..2481: note = Homo sapiens__Q16665-1__HIF1alpha CDS opt1
  source 1..2481: mol_type = other RNA

SEQ ID NO: 443 - RNA, 81 nt, synthetic construct
  misc_feature 1..81: note = Homo sapiens__Q16665-1__HIF1alpha(549-575) CDS opt1
  source 1..81: mol_type = other RNA
cccttctccacgcaggacaccgacctggacctcgagatgctggccccgtacatccccatggacgacgacttccagctgcgc

SEQ ID NO: 444 - RNA, 45 nt, synthetic construct; identical to SEQ ID NO: 258
  misc_feature 1..45: note = Artificial____Linker CDS opt1
  source 1..45: mol_type = other RNA

SEQ ID NO: 445 - RNA, 1362 nt, synthetic construct
  misc_feature 1..1362: note = Homo sapiens__Q01196-1__RUNX1(K83E_R174Q) CDS opt1
  source 1..1362: mol_type = other RNA
atgcgcatccccgtggacgccagcacctcccggcgcttcaccccgcccagcacggccctgtcccccggcaagatgagcgaggcgctccccctgggggccccggacgccggcgccgccctggcggggaagctccggtccggcgaccgcagcatggtcgaggtgctggccgaccaccccggggagctggtgcggaccgactcccccaacttcctctgcagcgtcctgcccacccactggcgctgcaacgagaccctgccgatcgccttcaaggtggtggccctcggcgacgtccccgacggcacgctggtgaccgtgatggcggggaacgacgagaactactccgccgagctgcggaacgccaccgccgccatgaagaaccaggtcgcgcgcttcaacgacctccggttcgtgggccgcagcgggcggggcaagtccttcaccctgacgatcaccgtgttcaccaacccgccccaggtcgccacctaccaccgcgccatcaagatcacggtggacgggccccaggagccccggcgccaccggcagaagctggacgaccagaccaagcccggcagcctctccttcagcgagcgcctgtccgagctggagcagctccggcgcaccgccatgcgggtgagcccccaccacccggcccccacccccaacccccgcgcgtccctgaaccacagcacggccttcaacccgcagccccagtcccagatgcaggacacccggcagatccagcccagcccgccctggagctacgaccagtcctaccagtacctgggcagcatcgcctcccccagcgtccaccccgccacccccatctccccggggcgcgccagcggcatgaccacgctctccgcggagctgagctcccgcctgagcaccgcccccgacctcaccgccttctccgacccccggcagttcccggccctgcccagcatctccgacccccgcatgcactaccccggggccttcacctacagcccgacgcccgtgacctccggcatcggcatcgggatgagcgcgatgggctccgccacccggtaccacacctacctgcccccgccctaccccgggagctcccaggcccagggcgggcccttccaggccagcagcccctcctaccacctctactacggcgcgagcgccggctcctaccagttcagcatggtcgggggcgagcgctccccgccccggatcctgccgccctgcacgaacgccagcaccgggtccgccctgctcaaccccagcctgcccaaccagtccgacgtggtggaggccgagggcagccactccaacagccccaccaacatggcgccctccgcccgcctggaggaggccgtgtggcggccgtactga

SEQ ID NO: 446 - RNA, 1362 nt, synthetic construct; identical to SEQ ID NO: 384
  misc_feature 1..1362: note = Homo sapiens__Q01196-1__RUNX1 CDS opt1
  source 1..1362: mol_type = other RNA

SEQ ID NO: 447 - RNA, 1443 nt, synthetic construct; identical to SEQ ID NO: 385
  misc_feature 1..1443: note = Homo sapiens__Q01196-8__RUNX1 CDS opt1
  source 1..1443: mol_type = other RNA

SEQ ID NO: 448 - RNA, 1419 nt, synthetic construct; identical to SEQ ID NO: 386
  misc_feature 1..1419: note = Homo sapiens__Q01196-2__RUNX1 CDS opt1
  source 1..1419: mol_type = other RNA

SEQ ID NO: 449 - RNA, 1419 nt, synthetic construct; identical to SEQ ID NO: 387
  misc_feature 1..1419: note = Homo sapiens__CAA56092.1__RUNX1 CDS opt1
  source 1..1419: mol_type = other RNA

SEQ ID NO: 450 - RNA, 1407 nt, synthetic construct; identical to SEQ ID NO: 388
  misc_feature 1..1407: note = Homo sapiens__Q01196-10__RUNX1 CDS opt1
  source 1..1407: mol_type = other RNA

SEQ ID NO: 451 - RNA, 1371 nt, synthetic construct; identical to SEQ ID NO: 389
  misc_feature 1..1371: note = Homo sapiens__Q01196-9__RUNX1 CDS opt1
  source 1..1371: mol_type = other RNA

SEQ ID NO: 452 - RNA, 1362 nt, synthetic construct; identical to SEQ ID NO: 390
  misc_feature 1..1362: note = Homo sapiens__AAA51720.1__RUNX1 CDS opt1
  source 1..1362: mol_type = other RNA

SEQ ID NO: 453 - RNA, 1170 nt, synthetic construct; identical to SEQ ID NO: 391
  misc_feature 1..1170: note = Homo sapiens__H9KVB1__RUNX1 CDS opt1
  source 1..1170: mol_type = other RNA

SEQ ID NO: 454 - RNA, 1047 nt, synthetic construct; identical to SEQ ID NO: 392
  misc_feature 1..1047: note = Homo sapiens__Q01196-11__RUNX1 CDS opt1
  source 1..1047: mol_type = other RNA

SEQ ID NO: 455 - RNA, 774 nt, synthetic construct; identical to SEQ ID NO: 393
  misc_feature 1..774: note = Homo sapiens__Q01196-4__RUNX1 CDS opt1
  source 1..774: mol_type = other RNA

SEQ ID NO: 456 - RNA, 771 nt, synthetic construct; identical to SEQ ID NO: 394
  misc_feature 1..771: note = Homo sapiens__A8MZI9__RUNX1 CDS opt1
  source 1..771: mol_type = other RNA

SEQ ID NO: 457 - RNA, 753 nt, synthetic construct; identical to SEQ ID NO: 395
  misc_feature 1..753: note = Homo sapiens__Q01196-3__RUNX1 CDS opt1
  source 1..753: mol_type = other RNA

SEQ ID NO: 458 - RNA, 729 nt, synthetic construct; identical to SEQ ID NO: 396
  misc_feature 1..729: note = Homo sapiens__Q01196-7__RUNX1 CDS opt1
  source 1..729: mol_type = other RNA

SEQ ID NO: 459 - RNA, 675 nt, synthetic construct; identical to SEQ ID NO: 397
  misc_feature 1..675: note = Homo sapiens__Q01196-5__RUNX1 CDS opt1
  source 1..675: mol_type = other RNA

SEQ ID NO: 460 - RNA, 567 nt, synthetic construct; identical to SEQ ID NO: 398
  misc_feature 1..567: note = Homo sapiens__Q01196-6__RUNX1 CDS opt1
  source 1..567: mol_type = other RNA

SEQ ID NO: 461 - RNA, 384 nt, synthetic construct; identical to SEQ ID NO: 399
  misc_feature 1..384: note = Homo sapiens__Q01196-1__RUNX1(1-128) CDS opt1
  source 1..384: mol_type = other RNA

SEQ ID NO: 462 - RNA, 531 nt, synthetic construct; identical to SEQ ID NO: 400
  misc_feature 1..531: note = Homo sapiens__Q01196-1__RUNX1(1-177) CDS opt1
  source 1..531: mol_type = other RNA

SEQ ID NO: 463 - RNA, 723 nt, synthetic construct; identical to SEQ ID NO: 401
  misc_feature 1..723: note = Homo sapiens__Q01196-1__RUNX1(1-241) CDS opt1
  source 1..723: mol_type = other RNA

SEQ ID NO: 464 - RNA, 1815 nt, synthetic construct; identical to SEQ ID NO: 402
  misc_feature 1..1815: note = Homo sapiens__Q06455-1__RUNX1T1a CDS opt1
  source 1..1815: mol_type = other RNA

SEQ ID NO: 465 - RNA, 1992 nt, synthetic construct; identical to SEQ ID NO: 403
  misc_feature 1..1992: note = Homo sapiens__A0A0A0MSU1__RUNX1T1a CDS opt1
  source 1..1992: mol_type = other RNA

SEQ ID NO: 466 - RNA, 1848 nt, synthetic construct; identical to SEQ ID NO: 404
  misc_feature 1..1848: note = Homo sapiens__Q06455-3__RUNX1T1a CDS opt1
  source 1..1848: mol_type = other RNA

SEQ ID NO: 467 - RNA, 1755 nt, synthetic construct; identical to SEQ ID NO: 405
  misc_feature 1..1755: note = Homo sapiens__A0A087WWT6__RUNX1T1a CDS opt1
  source 1..1755: mol_type = other RNA

SEQ ID NO: 468 - RNA, 1734 nt, synthetic construct; identical to SEQ ID NO: 406
  misc_feature 1..1734: note = Homo sapiens__Q06455-2__RUNX1T1a CDS opt1
  source 1..1734: mol_type = other RNA

SEQ ID NO: 469 - RNA, 1704 nt, synthetic construct; identical to SEQ ID NO: 407
  misc_feature 1..1704: note = Homo sapiens__Q06455-4__RUNX1T1a CDS opt1
  source 1..1704: mol_type = other RNA

SEQ ID NO: 470 - RNA, 1284 nt, synthetic construct; identical to SEQ ID NO: 408
  misc_feature 1..1284: note = Homo sapiens__Q06455-5__RUNX1T1a CDS opt1
  source 1..1284: mol_type = other RNA

SEQ ID NO: 471 - RNA, 1203 nt, synthetic construct; identical to SEQ ID NO: 409
  misc_feature 1..1203: note = Homo sapiens__Q06455-6__RUNX1T1a CDS opt1
  source 1..1203: mol_type = other RNA

SEQ ID NO: 472 - RNA, 1722 nt, synthetic construct
  misc_feature 1..1722: note = Homo sapiens__Q06455-1__RUNX1T1a(31-604) CDS opt1
  source 1..1722: mol_type = other RNA
cgcaccgagaagcacagcaccatgcccgactccccggtggacgtcaagacccagagccggctgaccccgcccaccatgcccccgccgcccaccacgcagggcgcgccccgcacctccagcttcacccccaccacgctcaccaacgggacctcccacagccccaccgccctgaacggcgccccctccccgcccaacgggttcagcaacggcccctccagctccagctccagctccctggccaaccagcagctcccgcccgcctgcggggcccggcagctgagcaagctgaagcgcttcctcacgaccctgcagcagttcggcaacgacatctcccccgagatcggcgagcgggtgcgcaccctggtgctcgggctggtcaacagcaccctgacgatcgaggagttccactccaagctccaggaggccaccaacttccccctgcggcccttcgtgatccccttcctgaaggcgaacctccccctgctgcagcgcgagctcctgcactgcgcccggctggccaagcagaaccccgcccagtacctcgcgcagcacgagcagctgctgctcgacgccagcaccaccagccccgtggactccagcgagctgctgctcgacgtcaacgagaacggcaagcgccggacgcccgaccgcaccaaggagaacgggttcgaccgggagccgctgcactccgagcaccccagcaagcgcccctgcaccatctcccccggccagcggtacagcccgaacaacgggctgtcctaccagcccaacggcctcccccacccgaccccgccgccgccccagcactaccgcctggacgacatggccatcgcccaccactaccgggacagctaccgccacccctcccaccgggacctgcgcgaccggaaccgccccatgggcctccacgggacgcgccaggaggagatgatcgaccaccggctgaccgaccgcgagtgggccgaggagtggaagcacctggaccacctcctgaactgcatcatggacatggtggagaagacccggcgcagcctgaccgtgctccggcgctgccaggaggcggaccgggaggagctgaactactggatccgccggtactccgacgccgaggacctgaagaagggcgggggcagctccagctcccacagccgccagcagtcccccgtcaaccccgaccccgtggccctcgacgcccaccgggagttcctgcaccgccccgccagcggctacgtgcccgaggagatctggaagaaggcggaggaggccgtcaacgaggtgaagcggcaggccatgacggagctgcagaaggccgtgtccgaggccgagcgcaaggcgcacgacatgatcaccaccgagcgggccaagatggagcgcaccgtcgccgaggccaagcggcaggccgcggaggacgccctcgccgtgatcaaccagcaggaggacagcagcgagtcctgctggaactgcgggcgcaaggccagcgagacgtgctccggctgcaacaccgcgcggtactgcgggagcttctgccagcacaaggactgggagaagcaccaccacatctgcggccagaccctgcaggcccagcagcagggggacacccccgccgtgtccagctccgtcacgcccaacagcggcgccggctcccccatggacacgcccccggccgcgacgccccgcagcaccacccccgggaccccctccaccatcgagaccaccccgcgc

SEQ ID NO: 473 - RNA, 1815 nt, synthetic construct; identical to SEQ ID NO: 411
  misc_feature 1..1815: note = Homo sapiens__O43439-1__RUNX1T1b CDS opt1
  source 1..1815: mol_type = other RNA

SEQ ID NO: 474 - RNA, 1845 nt, synthetic construct; identical to SEQ ID NO: 412
  misc_feature 1..1845: note = Homo sapiens__O43439-4__RUNX1T1b CDS opt1
  source 1..1845: mol_type = other RNA

SEQ ID NO: 475 - RNA, 1788 nt, synthetic construct; identical to SEQ ID NO: 413
  misc_feature 1..1788: note = Homo sapiens__O43439-5__RUNX1T1b CDS opt1
  source 1..1788: mol_type = other RNA

SEQ ID NO: 476 - RNA, 1728 nt, synthetic construct; identical to SEQ ID NO: 414
  misc_feature 1..1728: note = Homo sapiens__O43439-2__RUNX1T1b CDS opt1
  source 1..1728: mol_type = other RNA

SEQ ID NO: 477 - RNA, 48 nt, synthetic construct; identical to SEQ ID NO: 291
  misc_feature 1..48: note = Homo sapiens____RUNX1T1b(short) CDS opt1
  source 1..48: mol_type = other RNA

SEQ ID NO: 478 - RNA, 1749 nt, synthetic construct
  misc_feature 1..1749: note = Homo sapiens__O43439-1__RUNX1T1b(22-604) CDS opt1
  source 1..1749: mol_type = other RNA
ggccccgagaagcgcgtgccggccatgcccgggagccccgtcgaggtgaagatccagtcccggagctccccgcccaccatgccgcccctgccgcccatcaaccccggcgggccccgccccgtgagcttcacccccacggccctctccaacggcatcaaccactccccgcccaccctgaacggggcgcccagcccgccccagcggttcagcaacggccccgcctccagcacctccagcgccctgaccaaccagcagctccccgccacgtgcggcgcccgccagctgtccaagctgaagcggttcctcaccaccctgcagcagttcgggaacgacatcagccccgagatcggcgagaaggtccgcaccctggtgctcgcgctggtgaactccacggtcaccatcgaggagttccactgcaagctgcaggaggccaccaacttccccctccggcccttcgtgatccccttcctgaaggccaacctgccgctcctgcagcgcgagctgctccactgcgcccgggcggccaagcagacccccagccagtacctggcccagcacgagcacctcctgctgaacacgtccatcgccagccccgccgactccagcgagctgctcatggaggtgcacgggaacggcaagcgccccagcccggagcggcgcgaggagaactccttcgaccgggacaccatcgcgcccgagcccccggccaagcgcgtctgcaccatcagccccgcgccccggcactcccccgccctgaccgtgccgctgatgaaccccgggggccagttccaccccacgcccccgcccctccagcactacaccctggaggacatcgccaccagccacctgtaccgcgagcccaacaagatgctcgagcaccgggaggtgcgcgaccggcaccactccctgggcctgaacgggggctaccaggacgagctcgtcgaccaccgcctgaccgagcgggagtgggccgacgagtggaagcacctggaccacgccctcaactgcatcatggagatggtggagaagacgcgccgcagcatggccgtgctgcggcgctgccaggagtccgaccgggaggagctgaactactggaagcgccggtacaacgagaacaccgagctccgcaagaccgggaccgagctggtcagccggcagcactcccccggcagcgccgactccctgagcaacgactcccagcgcgagttcaacagccggccgggcacggggtacgtgcccgtggagttctggaagaagaccgaggaggccgtcaacaaggtgaagatccaggcgatgtccgaggtgcagaaggccgtcgccgaggccgagcagaaggccttcgaggtgatcgcgaccgagcgcgcccggatggagcagaccatcgccgacgtgaagcgccaggccgcggaggacgccttcctcgtcatcaacgagcaggaggagagcacggagaactgctggaactgcggccggaaggcctccgagacctgcagcgggtgcaacatcgcccgctactgcggctccttctgccagcacaaggactgggagcggcaccaccgcctgtgcgggcagaacctgcacggccagagcccccacggccaggggcggcccctcctgccggtgggccgcgggagctccgcccggagcgcggactgctccgtccccagccccgccctggacaagacctccgccaccacgagccgctccagcacccccgcctccgtgaccgccatcgacaccaacggcctg

SEQ ID NO: 479 - RNA, 1836 nt, synthetic construct
  misc_feature 1..1836: note = Homo sapiens____CBFbeta(1-165)_SMMHC(1527-1972) CDS opt1
  source 1..1836: mol_type = other RNA
atgccccgcgtggtcccggaccagcggagcaagttcgagaacgaggagttcttccgcaagctgtcccgggagtgcgagatcaagtacaccggcttccgcgaccggccccacgaggagcgccaggcccggttccagaacgcctgccgcgacgggcggagcgagatcgcgttcgtggccaccggcacgaacctctccctgcagttcttccccgccagctggcagggggagcagcgccagaccccctcccgggagtacgtggacctggagcgcgaggccggcaaggtctacctcaaggccccgatgatcctgaacggggtgtgcgtgatctggaagggctggatcgacctgcagcggctcgacggcatggggtgcctggagttcgacgaggagcgcgcgcagcaggaggacgccctggcccagcaggccttcgaggaggcgcggcgccggacccgcgagttcgaggaccgggaccgcagccaccgggaggagatggaggtccacgagctcgagaagtccaagcgcgccctggagacccagatggaggagatgaagacgcagctggaggagctcgaggacgagctgcaggccaccgaggacgccaagctgcgcctcgaggtgaacatgcaggccctgaagggccagttcgagcgggacctgcaggcgcgcgacgagcagaacgaggagaagcggcgccagctccagcggcagctgcacgagtacgagaccgagctggaggacgagcgcaagcagcgggccctcgccgccgccgcgaagaagaagctggagggggacctgaaggacctcgagctgcaggccgacagcgccatcaagggccgcgaggaggccatcaagcagctgcggaagctccaggcccagatgaaggacttccagcgcgagctggaggacgcgcgggcctcccgcgacgagatcttcgccaccgccaaggagaacgagaagaaggccaagagcctggaggcggacctcatgcagctgcaggaggacctggccgccgccgagcgggcgcgcaagcaggccgacctcgagaaggaggagctggccgaggagctggcctccagcctctccgggcggaacgccctgcaggacgagaagcgccggctggaggcgcgcatcgcccagctcgaggaggagctggaggaggagcagggcaacatggaggccatgagcgaccgggtgcgcaaggccacgcagcaggccgagcagctgtccaacgagctcgcgaccgagcgcagcaccgcccagaagaacgagtccgcccggcagcagctggagcgccagaacaaggagctgcggagcaagctccacgagatggagggcgccgtcaagtccaagttcaagagcaccatcgccgcgctggaggccaagatcgcccagctggaggagcaggtcgagcaggaggcccgcgagaagcaggcggccaccaagagcctgaagcagaaggacaagaagctcaaggagatcctgctccaggtggaggacgagcggaagatggccgagcagtacaaggagcaggccgagaaggggaacgcccgcgtgaagcagctgaagcggcagctggaggaggcggaggaggagtcccagcgcatcaacgccaaccggcgcaagctgcagcgggagctcgacgaggccacggagagcaacgaggccatgggccgcgaggtgaacgccctgaagtccaagctgcggcgcgggaacgagaccagcttcgtgccctcccggcgcagcggcggccggcgcgtcatcgagaacgcggacgggtccgaggaggagaccgacacgcgggacgccgacttcaacggcaccaaggccagcgagtga

SEQ ID NO: 480 - RNA, 1551 nt, synthetic construct
  misc_feature 1..1551: note = Artificial____CBFbeta(1-165)_SMMHC(1527-1877) CDS opt1
  source 1..1551: mol_type = other RNA
atgccccgcgtggtgccggaccagcggagcaagttcgagaacgaggagttcttccgcaagctgtcccgggagtgcgagatcaagtacacgggcttccgcgaccggccccacgaggagcgccaggcccggttccagaacgcctgccgcgacgggcggagcgagatcgcgttcgtggccaccggcacgaacctgtccctgcagttcttccccgccagctggcagggggagcagcgccagaccccctcccgggagtacgtggacctggagcgcgaggccggcaaggtctacctcaaggccccgatgatcctgaacggggtgtgcgtgatctggaagggctggatcgacctgcagcggctcgacggcatggggtgcctggagttcgacgaggagcgcgcgcagcaggaggacgccctggcccagcaggccttcgaggaggcgcggcgccggacccgcgagttcgaggaccgggaccgcagccaccgggaggagatggaggtccacgagctcgagaagtccaagcgcgccctggagacccagatggaggagatgaagacgcagctggaggagctcgaggacgagctgcaggccaccgaggacgccaagctgcgcctcgaggtgaacatgcaggccctgaagggccagttcgagcgggacctgcaggcgcgcgacgagcagaacgaggagaagcggcgccagctccagcggcagctgcacgagtacgagaccgagctggaggacgagcgcaagcagcgggccctcgccgccgccgcgaagaagaagctggagggggacctgaaggacctcgagctgcaggccgacagcgccatcaagggccgcgaggaggccatcaagcagctgcggaagctccaggcccagatgaaggacttccagcgcgagctggaggacgcgcgggcctcccgcgacgagatcttcgccaccgccaaggagaacgagaagaaggccaagagcctggaggcggacctcatgcagctgcaggaggacctggccgccgccgagcgggcgcgcaagcaggccgacctcgagaaggaggagctggccgaggagctggcctccagcctctccgggcggaacgccctgcaggacgagaagcgccggctggaggcgcgcatcgcccagctcgaggaggagctggaggaggagcagggcaacatggaggccatgagcgaccgggtgcgcaaggccacgcagcaggccgagcagctgtccaacgagctcgcgaccgagcgcagcaccgcccagaagaacgagtccgcccggcagcagctggagcgccagaacaaggagctgcggagcaagctccacgagatggagggcgccgtcaagtccaagttcaagagcaccatcgccgcgctggaggccaagatcgcccagctggaggagcaggtcgagcaggaggcccgcgagaagcaggcggccaccaagagcctgaagcagaaggacaagaagctcaaggagatcctgctccaggtggaggacgagcggaagatggccgagcagtacaaggagcaggccgagaaggggaacgcctga

SEQ ID NO: 481 - RNA, 612 nt, synthetic construct
  misc_feature 1..612: note = Artificial____CBFbeta(1-165)_Linker_Lifeact CDS opt1
  source 1..612: mol_type = other RNA
atgccccgcgtggtccccgaccagcggagcaagttcgagaacgaggagttcttccgcaagctgtcccgggagtgcgagatcaagtacaccggcttccgcgaccggccccacgaggagcgccaggcccggttccagaacgcctgccgcgacgggcggagcgagatcgcgttcgtggccaccggcacgaacctctccctgcagttcttccccgccagctggcagggggagcagcgccagaccccctcccgggagtacgtggacctggagcgcgaggccggcaaggtctacctcaaggccccgatgatcctgaacggggtgtgcgtgatctggaagggctggatcgacctgcagcggctcgacggcatggggtgcctggagttcgacgaggagcgcgcgcagcaggaggacgccctggcccagcaggccttcgaggaggcgcggcgccggacccgcgagttcgaggaccgggaccgcagccaccgggaggagatggagggcgggtccggcgggagcggcggctccgggggcagcgggggcggcggggtcgccgacctcatcaagaagttcgagtccatcagcaaggaggagggcgacccgcccgtggccacctga

SEQ ID NO: 482 - RNA, 579 nt, synthetic construct
  misc_feature 1..579: note = Artificial____CBFbeta(1-165)_HIF1alpha(549-575) CDS opt1
  source 1..579: mol_type = other RNA
atgccccgcgtggtcccggaccagcggagcaagttcgagaacgaggagttcttccgcaagctgtcccgggagtgcgagatcaagtacaccggcttccgcgaccggccccacgaggagcgccaggcccggttccagaacgcctgccgcgacgggcggagcgagatcgcgttcgtggccaccggcacgaacctctccctgcagttcttccccgccagctggcagggggagcagcgccagaccccctcccgggagtacgtggacctggagcgcgaggccggcaaggtctacctcaaggccccgatgatcctgaacggggtgtgcgtgatctggaagggctggatcgacctgcagcggctcgacggcatggggtgcctggagttcgacgaggagcgcgcgcagcaggaggacgccctggcccagcaggccttcgaggaggcgcggcgccggacccgcgagttcgaggaccgggaccgcagccaccgggaggagatggagcccttctccacccaggacacggacctcgacctggagatgctggccccctacatccccatggacgacgacttccagctccgctga

SEQ ID NO: 483 - RNA, 624 nt, synthetic construct
  misc_feature 1..624: note Artificial____CBFbeta(1-165)_Linker_HIF1alpha(549-575) CDS opt1
  source 1..624: mol_type = other RNA
atgccccgcgtggtcccggaccagcggagcaagttcgagaacgaggagttcttccgcaagctgtcccgggagtgcgagatcaagtacaccggcttccgcgaccggccccacgaggagcgccaggcccggttccagaacgcctgccgcgacgggcggagcgagatcgcgttcgtggccaccggcacgaacctctccctgcagttcttccccgccagctggcagggggagcagcgccagaccccctcccgggagtacgtggacctggagcgcgaggccggcaaggtctacctcaaggccccgatgatcctgaacggggtgtgcgtgatctggaagggctggatcgacctgcagcggctcgacggcatggggtgcctggagttcgacgaggagcgcgcgcagcaggaggacgccctggcccagcaggccttcgaggaggcgcggcgccggacccgcgagttcgaggaccgggaccgcagccaccgggaggagatggagggcgggtccggcgggagcggcggctccgggggcagcgggggcggccccttctccacccaggacacggacctcgacctggagatgctggccccctacatccccatggacgacgacttccagctccgctga

SEQ ID NO: 484 - RNA, 2259 nt, synthetic construct
  misc_feature 1..2259: note = Artificial____RUNX1(1-177)_N_RUNX1T1a(31-604) CDS opt1
  source 1..2259: mol_type = other RNA
atgcgcatccccgtggacgccagcacctcccggcgcttcaccccgcccagcacggccctgtcccccggcaagatgagcgaggcgctccccctgggggccccggacgccggcgccgccctggcggggaagctccggtccggcgaccgcagcatggtcgaggtgctggccgaccaccccggggagctggtgcggaccgactcccccaacttcctctgcagcgtcctgcccacccactggcgctgcaacaagaccctgccgatcgccttcaaggtggtggccctcggcgacgtccccgacggcacgctggtgaccgtgatggcggggaacgacgagaactactccgccgagctgcggaacgccaccgccgccatgaagaaccaggtcgcgcgcttcaacgacctccggttcgtgggccgcagcgggcggggcaagtccttcaccctgacgatcaccgtgttcaccaaccccccccaggtcgccacctaccaccgcgccatcaagatcacggtggacgggccgcgggagccccgcaaccggaccgagaagcacagcaccatgcccgactcccccgtggacgtcaagacccagagccgcctgacgccgcccaccatgccccccccgcccaccacccagggcgccccccggacgtccagcttcacccccaccaccctcacgaacggcacctcccacagcccgaccgccctgaacggggcgccctccccccccaacggcttcagcaacgggccgagctccagctccagctccagcctggccaaccagcagctcccccccgcctgcggcgcccgccagctgtccaagctgaagcggttcctcaccacgctgcagcagttcggcaacgacatcagcccggagatcggggagcgcgtgcggaccctggtgctcggcctggtcaactccaccctgaccatcgaggagttccacagcaagctccaggaggccacgaacttccccctgcgccccttcgtgatccccttcctgaaggcgaacctcccgctgctgcagcgcgagctcctgcactgcgcccggctggccaagcagaaccccgcccagtacctcgcccagcacgagcagctgctgctcgacgcgtccaccaccagccccgtggactccagcgagctgctgctcgacgtcaacgagaacgggaagcgccggacccccgaccgcacgaaggagaacggcttcgaccgggagccgctgcactccgagcaccccagcaagcgcccctgcaccatctcccccgggcagcggtacagcccgaacaacggcctgtcctaccagcccaacggcctcccccaccccaccccgccccccccccagcactaccgcctggacgacatggccatcgcccaccactaccgggacagctaccgccacccgagccaccgggacctgcgcgaccggaaccgccccatggggctgcacggcacccggcaggaggagatgatcgaccaccgcctcaccgaccgggagtgggccgaggagtggaagcacctggaccacctgctcaactgcatcatggacatggtggagaagacgcgccggtccctgaccgtgctgcgccgctgccaggaggcggaccgggaggagctcaactactggatccgccggtacagcgacgccgaggacctgaagaaggggggcgggtccagctccagccactcccgccagcagagccccgtcaaccccgacccggtggccctggacgcccaccgggagttcctccaccgccccgcctccggctacgtccccgaggagatctggaagaaggcggaggaggccgtgaacgaggtgaagcggcaggccatgaccgagctgcagaaggccgtcagcgaggccgagcgcaaggcgcacgacatgatcaccacggagcgggccaagatggagcgcaccgtggccgaggccaagcggcaggccgcggaggacgccctggccgtgatcaaccagcaggaggactccagcgagtcctgctggaactgcggccgcaaggccagcgagacctgctccgggtgcaacaccgcgcggtactgcggcagcttctgccagcacaaggactgggagaagcaccaccacatctgcgggcagacgctccaggcccagcagcagggcgacaccccggccgtctccagcagcgtgacccccaactccggggccggcagccccatggacacccccccggccgcgacgccccgctccaccacccccggcacccccagcacgatcgagaccaccccgcggtga

SEQ ID NO: 485 - RNA, 774 nt, synthetic construct
  misc_feature 1..774: note = Artificial____RUNX1(1-241)_RUNX1T1b(short) CDS opt1
  source 1..774: mol_type = other RNA
atgcgcatccccgtggacgccagcacctcccggcgcttcaccccgcccagcacggccctgtcccccggcaagatgagcgaggcgctccccctgggggccccggacgccggcgccgccctggcggggaagctccggtccggcgaccgcagcatggtcgaggtgctggccgaccaccccggggagctggtgcggaccgactcccccaacttcctctgcagcgtcctgcccacccactggcgctgcaacaagaccctgccgatcgccttcaaggtggtggccctcggcgacgtccccgacggcacgctggtgaccgtgatggcggggaacgacgagaactactccgccgagctgcggaacgccaccgccgccatgaagaaccaggtcgcgcgcttcaacgacctccggttcgtgggccgcagcgggcggggcaagtccttcaccctgacgatcaccgtgttcaccaacccgccccaggtcgccacctaccaccgcgccatcaagatcacggtggacgggccccgggagccccgccggcaccgccagaagctggacgaccagaccaagcccggcagcctctccttcagcgagcggctgtccgagctggagcagctccgccggaccgccatgcgcgtgagcccccaccacccggcccccacccccaacccccgggcgtccctgaaccacagcacggccttcaacccgcagccccagtcccagatgcaggaggtcggcttctgccacgtggcccaggtggggctgaagctcctgggctga

SEQ ID NO: 486 - RNA, 2478 nt, synthetic construct
  misc_feature 1..2478: note = Artificial____RUNX1(1-241)_V_RUNX1T1b(22-604) CDS opt1
  source 1..2478: mol_type = other RNA
atgcgcatccccgtggacgccagcacctcccggcgcttcaccccgcccagcacggccctgtcccccggcaagatgagcgaggcgctccccctgggggccccggacgccggcgccgccctggcggggaagctccggtccggcgaccgcagcatggtcgaggtgctggccgaccaccccggggagctggtgcggaccgactcccccaacttcctctgcagcgtcctgcccacccactggcgctgcaacaagaccctgccgatcgccttcaaggtggtggccctcggcgacgtccccgacggcacgctggtgaccgtgatggcggggaacgacgagaactactccgccgagctgcggaacgccaccgccgccatgaagaaccaggtcgcgcgcttcaacgacctccggttcgtgggccgcagcgggcggggcaagtccttcaccctgacgatcaccgtgttcaccaacccgccccaggtcgccacctaccaccgcgccatcaagatcacggtggacgggccccgggagccccgccggcaccgccagaagctggacgaccagaccaagcccggcagcctctccttcagcgagcggctgtccgagctggagcagctccgccggaccgccatgcgcgtgagcccccaccacccggcccccacccccaacccccgggcgtccctgaaccacagcacggccttcaacccgcagccccagtcccagatgcaggtcggccccgagaagcgcgtgcccgccatgccggggagccccgtggaggtcaagatccagagccgctccagcccgcccaccatgccgcccctgcccccgatcaaccccggcgggccccggcccgtgtccttcacccccaccgccctcagcaacggcatcaaccactccccgcccacgctgaacggcgcccccagcccgccccagcgcttctccaacgggcccgcgagctccaccagctccgccctgaccaaccagcagctccccgcgacctgcggcgcccggcagctgagcaagctgaagcgcttcctcacgaccctgcagcagttcgggaacgacatctcccccgagatcggcgagaaggtgcggaccctggtcctcgccctggtgaacagcaccgtgacgatcgaggagttccactgcaagctgcaggaggccaccaacttccccctccgccccttcgtcatccccttcctgaaggccaacctgccgctcctgcagcgggagctgctccactgcgcccgcgccgcgaagcagaccccctcccagtacctggcccagcacgagcacctcctgctgaacaccagcatcgcctcccccgccgacagctccgagctgctcatggaggtgcacgggaacggcaagcggcccagcccggagcgccgggaggagaacagcttcgaccgcgacacgatcgcccccgagccgcccgcgaagcgggtctgcaccatctcccccgcgccccgccacagccccgccctgaccgtgccgctgatgaaccccggcgggcagttccaccccacgcccccgcccctgcagcactacaccctcgaggacatcgccacctcccacctgtaccgggagcccaacaagatgctggagcaccgcgaggtgcgggaccgccaccacagcctcggcctgaacgggggctaccaggacgagctggtcgaccaccggctcaccgagcgcgagtgggccgacgagtggaagcacctggaccacgccctgaactgcatcatggagatggtggagaagacccgccggtccatggccgtgctccgccggtgccaggagagcgaccgcgaggagctgaactactggaagcggcgctacaacgagaacaccgagctgcggaagacggggaccgagctcgtctcccgccagcacagccccggctccgccgacagcctgtccaacgacagccagcgggagttcaactcccgcccgggcaccgggtacgtgcccgtggagttctggaagaagaccgaggaggccgtcaacaaggtgaagatccaggccatgagcgaggtgcagaaggcggtcgccgaggccgagcagaaggccttcgaggtgatcgcgacggagcgggcccgcatggagcagaccatcgccgacgtgaagcggcaggccgccgaggacgcgttcctggtcatcaacgagcaggaggagtccaccgagaactgctggaactgcggccgcaaggccagcgagacctgctccgggtgcaacatcgcccggtactgcggcagcttctgccagcacaaggactgggagcgccaccaccggctctgcgggcagaacctgcacggccagagcccccacggccaggggcgccccctgctcccggtgggccgggggtccagcgcccgctccgccgactgcagcgtgccctcccccgcgctggacaagacgagcgccaccacctcccggagctccacccccgccagcgtcacggccatcgacaccaacggcctgtga

SEQ ID NO: 487 - RNA, 2478 nt, synthetic construct
  misc_feature 1..2478: note = Artificial____RUNX1(1-241)_I_RUNX1T1b(22-604) CDS opt1
  source 1..2478: mol_type = other RNA
atgcgcatccccgtggacgccagcacctcccggcgcttcaccccgcccagcacggccctgtcccccggcaagatgagcgaggcgctccccctgggggccccggacgccggcgccgccctggcggggaagctccggtccggcgaccgcagcatggtcgaggtgctggccgaccaccccggggagctggtgcggaccgactcccccaacttcctctgcagcgtcctgcccacccactggcgctgcaacaagaccctgccgatcgccttcaaggtggtggccctcggcgacgtccccgacggcacgctggtgaccgtgatggcggggaacgacgagaactactccgccgagctgcggaacgccaccgccgccatgaagaaccaggtcgcgcgcttcaacgacctccggttcgtgggccgcagcgggcggggcaagtccttcaccctgacgatcaccgtgttcaccaacccgccccaggtcgccacctaccaccgcgccatcaagatcacggtggacgggccccgggagccccgccggcaccgccagaagctggacgaccagaccaagcccggcagcctctccttcagcgagcggctgtccgagctggagcagctccgccggaccgccatgcgcgtgagcccccaccacccggcccccacccccaacccccgggcgtccctgaaccacagcacggccttcaacccgcagccccagtcccagatgcagatcggccccgagaagcgcgtccccgccatgccggggagccccgtggaggtgaagatccagagccgctccagcccgcccaccatgccgcccctgcccccgatcaaccccggcgggccccggcccgtctccttcacccccaccgccctcagcaacggcatcaaccactccccgcccacgctgaacggcgcccccagcccgccccagcgcttctccaacgggcccgcgagctccaccagctccgccctgaccaaccagcagctccccgcgacctgcggcgcccggcagctgagcaagctgaagcgcttcctcacgaccctgcagcagttcgggaacgacatctcccccgagatcggcgagaaggtgcggaccctggtgctcgccctggtcaacagcaccgtgacgatcgaggagttccactgcaagctgcaggaggccaccaacttccccctccgccccttcgtgatccccttcctgaaggccaacctgccgctcctgcagcgggagctgctccactgcgcccgcgccgcgaagcagaccccctcccagtacctggcccagcacgagcacctcctgctgaacaccagcatcgcctcccccgccgacagctccgagctgctcatggaggtccacgggaacggcaagcggcccagcccggagcgccgggaggagaacagcttcgaccgcgacacgatcgcccccgagccgcccgcgaagcgggtgtgcaccatctcccccgcgccccgccacagccccgccctgaccgtcccgctgatgaaccccggcgggcagttccaccccacgcccccgcccctgcagcactacaccctcgaggacatcgccacctcccacctgtaccgggagcccaacaagatgctggagcaccgcgaggtgcgggaccgccaccacagcctcggcctgaacgggggctaccaggacgagctggtggaccaccggctcaccgagcgcgagtgggccgacgagtggaagcacctggaccacgccctgaactgcatcatggagatggtcgagaagacccgccggtccatggccgtgctccgccggtgccaggagagcgaccgcgaggagctgaactactggaagcggcgctacaacgagaacaccgagctgcggaagacggggaccgagctcgtgtcccgccagcacagccccggctccgccgacagcctgtccaacgacagccagcgggagttcaactcccgcccgggcaccgggtacgtccccgtggagttctggaagaagaccgaggaggccgtgaacaaggtcaagatccaggccatgagcgaggtgcagaaggcggtggccgaggccgagcagaaggccttcgaggtcatcgcgacggagcgggcccgcatggagcagaccatcgccgacgtgaagcggcaggccgccgaggacgcgttcctggtgatcaacgagcaggaggagtccaccgagaactgctggaactgcggccgcaaggccagcgagacctgctccgggtgcaacatcgcccggtactgcggcagcttctgccagcacaaggactgggagcgccaccaccggctctgcgggcagaacctgcacggccagagcccccacggccaggggcgccccctgctcccggtcggccgggggtccagcgcccgctccgccgactgcagcgtgccctcccccgcgctggacaagacgagcgccaccacctcccggagctccacccccgccagcgtgacggccatcgacaccaacggcctgtga

SEQ ID NO: 488 - RNA, 549 nt, synthetic construct
  misc_feature 1..549: note = Homo sapiens__Q13951-1__CBFbeta CDS opt3
  source 1..549: mol_type = other RNA
atgcctagagtggtgcccgaccagagaagcaagttcgagaacgaagagttctttcggaagctgagcagagagtgcgagatcaagtacaccggcttccgggacagaccccacgaagaaagacaggccagattccagaacgcctgcagagatggcagatccgagatcgcctttgtggccaccggcaccaatctgagcctgcagttctttccagcctcctggcagggcgagcagagacaaacacccagcagagaatacgtggacctggaacgcgaggccggcaaggtgtacctgaaggcccctatgatcctgaacggcgtgtgcgtgatctggaaaggctggatcgatctgcagcggctggatggcatgggctgcctggaatttgacgaggaaagagcccagcaagaggacgcccttgctcagcaggcctttgaggaagccagaaggcggaccagagagttcgaggacagagacagatcccaccgggaagagatggaagtgcgagtgtctcagctgctggccgtgaccggcaagaaaaccaccagaccttga

SEQ ID NO: 489 - RNA, 672 nt, synthetic construct
  misc_feature 1..672: note = Homo sapiens__A0A494C0A9__CBFbeta CDS opt3
  source 1..672: mol_type = other RNA
atgcctagagtggtgcccgaccagagaagcaagttcgagaacgaagagttctttcggaagctgagcagagagtgcgagatcaagtacaccggcttccgggacagaccccacgaagaaagacaggccagattccagaacgcctgcagagatggcagatccgagatcgcctttgtggccaccggcaccaatctgagcctgcagttctttccagcctcctggcagggcgagcagagacaaacacccagcagagaatacgtggacctggaacgcgaggccggcaaggtgtacctgaaggcccctatgatcctgaacggcgtgtgcgtgatctggaaaggctggatcgatctgcagcggctggatggcatgggctgcctggaatttgacgaggaaagagcccagcaagaggacgcccttgctcagcaggcctttgaggaagccagaaggcggaccagagagttcgaggacagagacagatcccaccgggaagagatggaagtgcgagtgtctcagctgctggccgtgacagaatggcggagcaccagaaagttcagcagcttctggatccctcctcctcggggctgtttctgtatcgccctgacctccagagagaacagcagctgttggtgcgtgttcttccggctgatctggtcccacctgatgaccgcctcttga

SEQ ID NO: 490 - RNA, 609 nt, synthetic construct
  misc_feature 1..609: note = Homo sapiens__J3KRT0__CBFbeta CDS opt3
  source 1..609: mol_type = other RNA
atgcctagagtggtgcccgaccagagaagcaagttcgagaacgaagagttctttcggaagctgagcagagagtgcgagatcaagtacaccggcttccgggacagaccccacgaagaaagacaggccagattccagaacgcctgcagagatggcagatccgagatcgtgtccagactggccagaggcgctagaggatctctggtggctagaggaagaggcggccctggcagattcagaacagctgccagactgctgagactgcccgagctgtctggaagaaggctgacaagctacagcggcttcaagatgcggaaccagatgccaagagccggcaccagaggcgagacactgtttctgggacttgccgccgtggccagagtgggccaaagatctacagctagcggcgccagaaccagagccagactgaacaaaagacgggccctgttccggcggagacatcggagaagagtgcagggcatctgcagcaagcagacccctatccggaagaagaagtggtcctttattcagggcttctgcggccacagaaaccagagcgtgtccccagtgtttagcggacagctggccggaagaaccgccaccaatacttga

SEQ ID NO: 491 - RNA, 564 nt, synthetic construct
  misc_feature 1..564: note = Homo sapiens__Q13951-2__CBFbeta CDS opt3
  source 1..564: mol_type = other RNA
atgcctagagtggtgcccgaccagagaagcaagttcgagaacgaagagttctttcggaagctgagcagagagtgcgagatcaagtacaccggcttccgggacagaccccacgaagaaagacaggccagattccagaacgcctgcagagatggcagatccgagatcgcctttgtggccaccggcaccaatctgagcctgcagttctttccagcctcctggcagggcgagcagagacaaacacccagcagagaatacgtggacctggaacgcgaggccggcaaggtgtacctgaaggcccctatgatcctgaacggcgtgtgcgtgatctggaaaggctggatcgatctgcagcggctggatggcatgggctgcctggaatttgacgaggaaagagcccagcaagaggacgcccttgctcagcaggcctttgaggaagccagaaggcggaccagagagttcgaggacagagacagatcccaccgggaagagatggaagctcggagacagcaggatccctctcctggctctaatcttggcggcggagatgacctgaagctgcggtaa

SEQ ID NO: 492 - RNA, 423 nt, synthetic construct
  misc_feature 1..423: note = Homo sapiens__Q13951-1__CBFbeta(1-141) CDS opt3
  source 1..423: mol_type = other RNA
atgcctagagtggtgcccgaccagagaagcaagttcgagaacgaagagttctttcggaagctgagcagagagtgcgagatcaagtacaccggcttccgggacagaccccacgaagaaagacaggccagattccagaacgcctgcagagatggcagatccgagatcgcctttgtggccaccggcaccaatctgagcctgcagttctttccagcctcctggcagggcgagcagagacaaacacccagcagagaatacgtggacctggaacgcgaggccggcaaggtgtacctgaaggcccctatgatcctgaacggcgtgtgcgtgatctggaaaggctggatcgatctgcagcggctggatggcatgggctgcctggaatttgacgaggaaagagcccagcaagaggacgcccttgctcagcag

SEQ ID NO: 493 - RNA, 495 nt, synthetic construct
  misc_feature 1..495: note = Homo sapiens__Q13951-1__CBFbeta(1-165) CDS opt3
  source 1..495: mol_type = other RNA
atgcctagagtggtgcccgaccagagaagcaagttcgagaacgaagagttctttcggaagctgagcagagagtgcgagatcaagtacaccggcttccgggacagaccccacgaagaaagacaggccagattccagaacgcctgcagagatggcagatccgagatcgcctttgtggccaccggcaccaatctgagcctgcagttctttccagcctcctggcagggcgagcagagacaaacacccagcagagaatacgtggacctggaacgcgaggccggcaaggtgtacctgaaggcccctatgatcctgaacggcgtgtgcgtgatctggaaaggctggatcgatctgcagcggctggatggcatgggctgcctggaatttgacgaggaaagagcccagcaagaggacgcccttgctcagcaggcctttgaggaagccagaaggcggaccagagagttcgaggacagagacagatcccaccgggaagagatggaa

SEQ ID NO: 494 - RNA, 5919 nt, synthetic construct
  misc_feature 1..5919: note = Homo sapiens__P35749-1__SMMHC CDS opt3
  source 1..5919: mol_type = other RNA
atggcccagaaaggccagctgagcgacgacgagaagttcctgttcgtggacaagaacttcatcaacagccccgtggctcaggccgattgggccgctaaaagacttgtgtgggtgccctctgagaagcagggatttgaggccgccagcatcaaagaagagaagggcgacgaggtggtggtggaactggtggaaaacggcaagaaagtgaccgtgggcaaagacgacatccagaagatgaaccctccaaagttcagcaaggtcgaggacatggccgagctgacctgtctgaatgaggccagcgtgctgcacaacctgagagagagatacttcagcggcctgatctacacctactccggcctgttctgcgtggtggtcaacccctacaaacatctgcccatctacagcgagaagatcgtggacatgtacaagggcaagaaacggcacgagatgcctccacacatctacgccattgccgacaccgcctacagatccatgctgcaggacagagaggaccagagcatcctgtgtaccggcgaatctggcgccggaaagaccgagaacaccaagaaagtcatccagtacctggccgtggtggccagctctcacaagggaaagaaggacaccagcatcaccggcgagctggaaaaacagctgctgcaggccaatcctatcctggaagccttcggcaacgccaagaccgtgaagaacgacaacagcagcagattcggcaagttcatccgcatcaacttcgacgtgaccggctacatcgtgggcgccaacatcgagacatacctgctggaaaagagccgggccatcagacaggccagagatgagagaaccttccacatcttctactacatgatcgctggcgccaaagaaaagatgcggagcgacctgctgctggaaggcttcaacaactacaccttcctgagcaacggcttcgtgcccattcctgccgctcaggacgatgagatgttccaagagacagtggaagccatggccatcatgggcttcagcgaggaagaacagctgtccatcctgaaggtggtgtcctccgttctgcagctgggcaacatcgtgttcaagaaagagcggaacaccgaccaggccagcatgcccgataataccgccgctcagaaagtgtgccacctgatgggcatcaacgtgaccgacttcacccggtccattctgacccctcggatcaaagtgggcagagatgtggtgcagaaggcccagacaaaagagcaggccgactttgccgtggaagctctggccaaggccacctacgagagactgttccggtggatcctgaccagagtgaacaaggccctggacaagacccatagacagggcgccagcttcctgggcatcctggatattgccggcttcgagatctttgaagtgaacagcttcgagcagctgtgcatcaattacaccaacgagaagctccagcagctctttaaccacaccatgttcatcctcgagcaagaggaataccagcgcgagggcatcgagtggaatttcatcgacttcggcctggacctgcagccttgcatcgagctgattgagcggcctaacaaccctcctggcgttctggctctgctggacgaggaatgctggttccctaaggccaccgacaagagcttcgtggaaaagctgtgcaccgagcagggctctcaccccaagttccagaagcctaagcagctgaaggataagaccgagttcagcatcatccactacgccggcaaggtggactacaatgcctctgcctggctgaccaagaacatggaccctctgaacgacaatgtgaccagcctgctgaacgccagcagcgacaagtttgtggccgacctgtggaaggacgtggacagaatcgttggcctggatcagatggccaagatgaccgagagcagcctgcctagcgccagcaagaccaaaaagggcatgttcagaaccgtgggccagctgtacaaagagcagctgggaaagctgatgaccacactgcggaacacaacccctaacttcgtgcggtgcatcatccccaaccacgagaagagatccggcaagctggatgccttcctggtgctggaacagctgagatgcaacggcgtgctcgagggaatcagaatctgcagacagggcttccccaaccggattgtgtttcaagagttccggcagcgctacgagatcctggccgccaatgccattcctaagggcttcatggatggcaagcaggcctgtatcctgatgatcaaagccctggaactggaccccaacctgtacagaatcggccagagcaagatcttcttccggactggcgtgctggcccatctggaagaagagagggacctgaagatcaccgacgtgatcatggcctttcaggccatgtgcagaggctacctggccagaaaagccttcgccaagaggcagcagcagctcaccgccatgaaagtgatccagagaaactgcgccgcctacctgaagctgagaaactggcaatggtggcggctgttcaccaaagtgaagcccctgctgcaagtgaccagacaagaggaagagatgcaggctaaagaggacgagctgcaaaagaccaaagagcggcagcagaaggctgagaacgagctgaaagaactggaacagaagcacagccagctgaccgaggaaaagaacctgctccaagagcaactgcaggccgagacagagctgtatgccgaggccgaagaaatgagagtccggctggccgctaagaagcaagagctggaagagattctgcacgaaatggaagcccgcctcgaagaagaagaggacagaggccaacagctgcaggctgagcggaagaaaatggcccagcagatgctggacctcgaggaacagcttgaggaagaggaagccgccagacagaaactgcagctcgaaaaagtgacagccgaggccaaaatcaagaagctcgaggacgagattctggtcatggacgaccagaacaacaagctgagcaaagagaggaagctcctggaagaacggatcagcgacctgaccaccaacctggctgaggaagaagaaaaggccaagaacctgaccaagctgaagaacaagcacgagagcatgatcagcgaactggaagtgcggctgaagaaagaggaaaagtcccggcaagaactcgagaagctgaagcggaagctggaaggggatgccagcgatttccacgagcagattgccgatctgcaggcccagatcgccgaactgaaaatgcagctggccaagaaagaagaggaactccaggctgccctggccagactggatgatgagatcgcccagaagaacaacgccctcaagaagatccgggaactcgagggccacatctccgacctgcaagaggatctggacagcgaaagggccgccagaaacaaggccgagaagcagaagagagatctgggcgaagaacttgaggccctgaaaaccgaactcgaagataccctggacagcaccgccacacagcaagaactgcgggccaagcgggaacaagaagtgactgtcctgaagaaggccctcgacgaggaaacaagatcccacgaggcccaggtgcaagagatgaggcagaaacatgcccaggccgtcgaggaactgaccgagcagctcgagcagttcaagcgggccaaagccaacctggacaaaaacaagcagaccctcgagaaagagaacgccgatctggccggcgaactgagagttctcggacaggccaaacaagaggtggaacacaagaaaaagaaactcgaagctcaggtccaagagctgcagagcaagtgtagcgacggcgaaagagccagagctgagctgaatgacaaggtgcacaaactgcagaatgaggtggaaagcgtgacaggcatgctgaacgaggccgagggcaaagccatcaagctggctaaggatgtggcctctctgagcagccagctccaggacactcaagaattgctgcaagaagagacacggcagaaactgaacgtgtccaccaagctgcgccagctcgaagaggaaagaaatagcctgcaggaccagctggacgaagagatggaagccaagcagaacctggaacggcacatcagcaccctgaacatccagctgtccgactccaagaagaagctgcaggatttcgccagcaccgtcgaggctctggaagagggcaaaaagcggttccagaaagagatcgagaatctgacccagcagtatgaggaaaaggccgctgcctacgacaagctcgagaaaacaaagaaccggctgcagcaagagttggacgacctggtggtcgacctggataaccagagacagctggtgtctaatctcgagaagaagcagcggaagttcgatcagctgctggccgaagagaagaacatcagctctaagtacgccgacgagcgggacagagcagaagccgaagccagagagaaagaaacaaaggccctgagcctggctcgcgcccttgaagaagcactggaagctaaagaagaattggagcggaccaacaagatgctgaaggccgagatggaagatctggtgtccagcaaggacgacgtgggcaagaatgtgcatgagcttgagaagtccaagcgcgccctggaaacccaaatggaagagatgaagacccagctcgaggaacttgaggatgagctgcaggcaaccgaggacgccaagctgaggctggaagtgaatatgcaggctctgaagggccagttcgagcgcgatctccaggctagggatgagcagaatgaagagaagcggaggcagctccagaggcagctgcacgagtatgagactgagttggaggacgaacggaagcagagagcactggccgctgctgccaagaagaaactggaaggcgacctgaaggacctggaacttcaggccgacagcgccatcaagggcagagaagaggccattaagcagctccgcaagctccaggcacagatgaaggacttccagcgggaacttgaagatgccagagccagccgggatgagatcttcgccaccgccaaagagaatgagaagaaagccaagtctctggaagccgatctgatgcagcttcaagaggacctggctgccgccgagagagctagaaaacaggctgacctggaaaaagaagaactggcagaggaactggcctccagcctgtctggcagaaacgctctgcaggatgagaagcgcagactggaagccagaatcgcccaattggaggaagaacttgaagaggaacagggcaacatggaagctatgagcgacagagtgcggaaggccactcagcaagccgaacagctctctaacgagctggctaccgagagatctaccgcacagaagaacgagagcgctagacagcagttggagcggcagaacaaagagttgcggagcaaactgcatgagatggaaggcgccgtgaagtccaagttcaagagcacaatcgctgccctcgaggccaagatcgctcaactggaagaacaggtggaacaagaggcccgcgaaaagcaggccgccacaaagagcctgaagcagaaagacaaaaagctcaaagaaattctgctccaggtggaagatgagcgcaagatggccgaacagtacaaagaacaggcagaaaagggcaacgcccgcgtgaaacagctgaaacggcaattggaagaggcagaagaagaatcccagcggatcaacgccaaccgccggaaacttcagagagagcttgacgaagccaccgagtccaacgaggccatgggaagagaagtgaacgccctgaagtctaagctgcggagaggcaacgaaaccagctttgtgccttctcggagatctggcggcagacgcgtgatcgaaaatgccgatggatcagaggaagaaaccgacaccagggacgccgacttcaatggcacaaaggcctccgagtga

SEQ ID NO: 495 - RNA, 5940 nt, synthetic construct
  misc_feature 1..5940: note = Homo sapiens__P35749-2__SMMHC CDS opt3
  source 1..5940: mol_type = other RNA
atggcccagaaaggccagctgagcgacgacgagaagttcctgttcgtggacaagaacttcatcaacagccccgtggctcaggccgattgggccgctaaaagacttgtgtgggtgccctctgagaagcagggatttgaggccgccagcatcaaagaagagaagggcgacgaggtggtggtggaactggtggaaaacggcaagaaagtgaccgtgggcaaagacgacatccagaagatgaaccctccaaagttcagcaaggtcgaggacatggccgagctgacctgtctgaatgaggccagcgtgctgcacaacctgagagagagatacttcagcggcctgatctacacctactccggcctgttctgcgtggtggtcaacccctacaaacatctgcccatctacagcgagaagatcgtggacatgtacaagggcaagaaacggcacgagatgcctccacacatctacgccattgccgacaccgcctacagatccatgctgcaggacagagaggaccagagcatcctgtgtaccggcgaatctggcgccggaaagaccgagaacaccaagaaagtcatccagtacctggccgtggtggccagctctcacaagggaaagaaggacaccagcatcacacagggccccagctttgcctatggcgagctggaaaaacagctgctgcaggccaatcctatcctggaagccttcggcaacgccaagaccgtgaagaacgacaacagcagcagattcggcaagttcatccgcatcaacttcgacgtgaccggctacatcgtgggcgccaacatcgagacatacctgctggaaaagagccgggccatcagacaggccagagatgagagaaccttccacatcttctactacatgatcgctggcgccaaagaaaagatgcggagcgacctgctgctggaaggcttcaacaactacaccttcctgagcaacggcttcgtgcccattcctgccgctcaggacgatgagatgttccaagagacagtggaagccatggccatcatgggcttcagcgaggaagaacagctgtccatcctgaaggtggtgtcctccgttctgcagctgggcaacatcgtgttcaagaaagagcggaacaccgaccaggccagcatgcccgataataccgccgctcagaaagtgtgccacctgatgggcatcaacgtgaccgacttcacccggtccattctgacccctcggatcaaagtgggcagagatgtggtgcagaaggcccagacaaaagagcaggccgactttgccgtggaagctctggccaaggccacctacgagagactgttccggtggatcctgaccagagtgaacaaggccctggacaagacccatagacagggcgctagcttcctgggcatcctggatatcgccggcttcgagatctttgaagtgaacagcttcgagcagctgtgcatcaattacaccaacgagaagctccagcagctctttaaccacaccatgttcatcctcgagcaagaggaataccagcgcgagggcatcgagtggaatttcatcgacttcggcctggacctgcagccttgcatcgagctgattgagcggcctaacaaccctcctggcgttctggctctgctggacgaggaatgctggttccctaaggccaccgacaagagcttcgtggaaaagctgtgcaccgagcagggctctcaccccaagttccagaagcctaagcagctgaaggataagaccgagttcagcatcatccactacgccggcaaggtggactacaatgcctctgcctggctgaccaagaacatggaccctctgaacgacaatgtgaccagcctgctgaacgccagcagcgacaagtttgtggccgacctgtggaaggacgtggacagaatcgttggcctggatcagatggccaagatgaccgagagcagcctgcctagcgccagcaagaccaaaaagggcatgttcagaaccgtgggccagctgtacaaagagcagctgggaaagctgatgaccacactgcggaacacaacccctaacttcgtgcggtgcatcatccccaaccacgagaagagatccggcaagctggatgccttcctggtgctggaacagctgagatgcaacggcgtgctcgagggaatcagaatctgcagacagggcttccccaaccggattgtgtttcaagagttccggcagcgctacgagatcctggccgccaatgccattcctaagggcttcatggatggcaagcaggcctgtatcctgatgatcaaagccctggaactggaccccaacctgtacagaatcggccagagcaagatcttcttccggactggcgtgctggcccatctggaagaagagagggacctgaagatcaccgacgtgatcatggcctttcaggccatgtgcagaggctacctggccagaaaagccttcgccaagaggcagcagcagctcaccgccatgaaagtgatccagagaaactgcgccgcctacctgaagctgagaaactggcaatggtggcggctgttcaccaaagtgaagcccctgctgcaagtgaccagacaagaggaagagatgcaggctaaagaggacgagctgcaaaagaccaaagagcggcagcagaaggctgagaacgagctgaaagaactggaacagaagcacagccagctgaccgaggaaaagaacctgctccaagagcaactgcaggccgagacagagctgtatgccgaggccgaagaaatgagagtccggctggccgctaagaagcaagagctggaagagattctgcacgaaatggaagcccgcctcgaagaagaagaggacagaggccaacagctgcaggctgagcggaagaaaatggcccagcagatgctggacctcgaggaacagcttgaggaagaggaagccgccagacagaaactgcagctcgaaaaagtgacagccgaggccaaaatcaagaagctcgaggacgagattctggtcatggacgaccagaacaacaagctgagcaaagagaggaagctcctggaagaacggatcagcgacctgaccaccaacctggctgaggaagaagaaaaggccaagaacctgaccaagctgaagaacaagcacgagagcatgatcagcgaactggaagtgcggctgaagaaagaggaaaagtcccggcaagaactcgagaagctgaagcggaagctggaaggggatgccagcgatttccacgagcagattgccgatctgcaggcccagatcgccgaactgaaaatgcagctggccaagaaagaagaggaactccaggctgccctggccagactggatgatgagatcgcccagaagaacaacgccctcaagaagatccgggaactcgagggccacatctccgacctgcaagaggatctggacagcgaaagggccgccagaaacaaggccgagaagcagaagagagatctgggcgaagaacttgaggccctgaaaaccgaactcgaagataccctggacagcaccgccacacagcaagaactgcgggccaagcgggaacaagaagtgactgtcctgaagaaggccctcgacgaggaaacaagatcccacgaggcccaggtgcaagagatgaggcagaaacatgcccaggccgtcgaggaactgaccgagcagctcgagcagttcaagcgggccaaagccaacctggacaaaaacaagcagaccctcgagaaagagaacgccgatctggccggcgaactgagagttctcggacaggccaaacaagaggtggaacacaagaaaaagaaactcgaagctcaggtccaagagctgcagagcaagtgtagcgacggcgaaagagccagagctgagctgaatgacaaggtgcacaaactgcagaatgaggtggaaagcgtgacaggcatgctgaacgaggccgagggcaaagccatcaagctggctaaggatgtggcctctctgagcagccagctccaggacactcaagaattgctgcaagaagagacacggcagaaactgaacgtgtccaccaagctgcgccagctcgaagaggaaagaaatagcctgcaggaccagctggacgaagagatggaagccaagcagaacctggaacggcacatcagcaccctgaacatccagctgtccgactccaagaagaagctgcaggatttcgccagcaccgtcgaggctctggaagagggcaaaaagcggttccagaaagagatcgagaatctgacccagcagtatgaggaaaaggccgctgcctacgacaagctcgagaaaacaaagaaccggctgcagcaagagttggacgacctggtggtcgacctggataaccagagacagctggtgtctaatctcgagaagaagcagcggaagttcgatcagctgctggccgaagagaagaacatcagctctaagtacgccgacgagcgggacagagcagaagccgaagccagagagaaagaaacaaaggccctgagcctggctcgcgcccttgaagaagcactggaagctaaagaagaattggagcggaccaacaagatgctgaaggccgagatggaagatctggtgtccagcaaggacgacgtgggcaagaatgtgcatgagcttgagaagtccaagcgcgccctggaaacccaaatggaagagatgaagacccagctcgaggaacttgaggatgagctgcaggcaaccgaggacgccaagctgaggctggaagtgaatatgcaggctctgaagggccagttcgagcgcgatctccaggctagggatgagcagaatgaagagaagcggaggcagctccagaggcagctgcacgagtatgagactgagttggaggacgaacggaagcagagagcactggccgctgctgccaagaagaaactggaaggcgacctgaaggacctggaacttcaggccgacagcgccatcaagggcagagaagaggccattaagcagctccgcaagctccaggcacagatgaaggacttccagcgggaacttgaagatgccagagccagccgggatgagatcttcgccaccgccaaagagaatgagaagaaagccaagtctctggaagccgatctgatgcagcttcaagaggacctggctgccgccgagagagctagaaaacaggctgacctggaaaaagaagaactggcagaggaactggcctccagcctgtctggcagaaacgctctgcaggatgagaagcgcagactggaagccagaatcgcccaattggaggaagaacttgaagaggaacagggcaacatggaagctatgagcgacagagtgcggaaggccactcagcaagccgaacagctctctaacgagctggctaccgagagatctaccgcacagaagaacgagagcgctagacagcagttggagcggcagaacaaagagttgcggagcaaactgcatgagatggaaggcgccgtgaagtccaagttcaagagcacaatcgctgccctcgaggccaagatcgctcaactggaagaacaggtggaacaagaggcccgcgaaaagcaggccgccacaaagagcctgaagcagaaagacaaaaagctcaaagaaattctgctccaggtggaagatgagcgcaagatggccgaacagtacaaagaacaggcagaaaagggcaacgcccgcgtgaaacagctgaaacggcaattggaagaggcagaagaagaatcccagcggatcaacgccaaccgccggaaacttcagagagagcttgacgaagccaccgagtccaacgaggccatgggaagagaagtgaacgccctgaagtctaagctgcggagaggcaacgaaaccagctttgtgccttctcggagatctggcggcagacgcgtgatcgaaaatgccgatggatcagaggaagaaaccgacaccagggacgccgacttcaatggcacaaaggcctccgagtga

SEQ ID NO: 496 - RNA, 5838 nt, synthetic construct
  misc_feature 1..5838: note = Homo sapiens__P35749-3__SMMHC CDS opt3
  source 1..5838: mol_type = other RNA
atggcccagaaaggccagctgagcgacgacgagaagttcctgttcgtggacaagaacttcatcaacagccccgtggctcaggccgattgggccgctaaaagacttgtgtgggtgccctctgagaagcagggatttgaggccgccagcatcaaagaagagaagggcgacgaggtggtggtggaactggtggaaaacggcaagaaagtgaccgtgggcaaagacgacatccagaagatgaaccctccaaagttcagcaaggtcgaggacatggccgagctgacctgtctgaatgaggccagcgtgctgcacaacctgagagagagatacttcagcggcctgatctacacctactccggcctgttctgcgtggtggtcaacccctacaaacatctgcccatctacagcgagaagatcgtggacatgtacaagggcaagaaacggcacgagatgcctccacacatctacgccattgccgacaccgcctacagatccatgctgcaggacagagaggaccagagcatcctgtgtaccggcgaatctggcgccggaaagaccgagaacaccaagaaagtcatccagtacctggccgtggtggccagctctcacaagggaaagaaggacaccagcatcacacagggccccagctttgcctatggcgagctggaaaaacagctgctgcaggccaatcctatcctggaagccttcggcaacgccaagaccgtgaagaacgacaacagcagcagattcggcaagttcatccgcatcaacttcgacgtgaccggctacatcgtgggcgccaacatcgagacatacctgctggaaaagagccgggccatcagacaggccagagatgagagaaccttccacatcttctactacatgatcgctggcgccaaagaaaagatgcggagcgacctgctgctggaaggcttcaacaactacaccttcctgagcaacggcttcgtgcccattcctgccgctcaggacgatgagatgttccaagagacagtggaagccatggccatcatgggcttcagcgaggaagaacagctgtccatcctgaaggtggtgtcctccgttctgcagctgggcaacatcgtgttcaagaaagagcggaacaccgaccaggccagcatgcccgataataccgccgctcagaaagtgtgccacctgatgggcatcaacgtgaccgacttcacccggtccattctgacccctcggatcaaagtgggcagagatgtggtgcagaaggcccagacaaaagagcaggccgactttgccgtggaagctctggccaaggccacctacgagagactgttccggtggatcctgaccagagtgaacaaggccctggacaagacccatagacagggcgctagcttcctgggcatcctggatatcgccggcttcgagatctttgaagtgaacagcttcgagcagctgtgcatcaattacaccaacgagaagctccagcagctctttaaccacaccatgttcatcctcgagcaagaggaataccagcgcgagggcatcgagtggaatttcatcgacttcggcctggacctgcagccttgcatcgagctgattgagcggcctaacaaccctcctggcgttctggctctgctggacgaggaatgctggttccctaaggccaccgacaagagcttcgtggaaaagctgtgcaccgagcagggctctcaccccaagttccagaagcctaagcagctgaaggataagaccgagttcagcatcatccactacgccggcaaggtggactacaatgcctctgcctggctgaccaagaacatggaccctctgaacgacaatgtgaccagcctgctgaacgccagcagcgacaagtttgtggccgacctgtggaaggacgtggacagaatcgttggcctggatcagatggccaagatgaccgagagcagcctgcctagcgccagcaagaccaaaaagggcatgttcagaaccgtgggccagctgtacaaagagcagctgggaaagctgatgaccacactgcggaacacaacccctaacttcgtgcggtgcatcatccccaaccacgagaagagatccggcaagctggatgccttcctggtgctggaacagctgagatgcaacggcgtgctcgagggaatcagaatctgcagacagggcttccccaaccggattgtgtttcaagagttccggcagcgctacgagatcctggccgccaatgccattcctaagggcttcatggatggcaagcaggcctgtatcctgatgatcaaagccctggaactggaccccaacctgtacagaatcggccagagcaagatcttcttccggactggcgtgctggcccatctggaagaagagagggacctgaagatcaccgacgtgatcatggcctttcaggccatgtgcagaggctacctggccagaaaagccttcgccaagaggcagcagcagctcaccgccatgaaagtgatccagagaaactgcgccgcctacctgaagctgagaaactggcaatggtggcggctgttcaccaaagtgaagcccctgctgcaagtgaccagacaagaggaagagatgcaggctaaagaggacgagctgcaaaagaccaaagagcggcagcagaaggctgagaacgagctgaaagaactggaacagaagcacagccagctgaccgaggaaaagaacctgctccaagagcaactgcaggccgagacagagctgtatgccgaggccgaagaaatgagagtccggctggccgctaagaagcaagagctggaagagattctgcacgaaatggaagcccgcctcgaagaagaagaggacagaggccaacagctgcaggctgagcggaagaaaatggcccagcagatgctggacctcgaggaacagcttgaggaagaggaagccgccagacagaaactgcagctcgaaaaagtgacagccgaggccaaaatcaagaagctcgaggacgagattctggtcatggacgaccagaacaacaagctgagcaaagagaggaagctcctggaagaacggatcagcgacctgaccaccaacctggctgaggaagaagaaaaggccaagaacctgaccaagctgaagaacaagcacgagagcatgatcagcgaactggaagtgcggctgaagaaagaggaaaagtcccggcaagaactcgagaagctgaagcggaagctggaaggggatgccagcgatttccacgagcagattgccgatctgcaggcccagatcgccgaactgaaaatgcagctggccaagaaagaagaggaactccaggctgccctggccagactggatgatgagatcgcccagaagaacaacgccctcaagaagatccgggaactcgagggccacatctccgacctgcaagaggatctggacagcgaaagggccgccagaaacaaggccgagaagcagaagagagatctgggcgaagaacttgaggccctgaaaaccgaactcgaagataccctggacagcaccgccacacagcaagaactgcgggccaagcgggaacaagaagtgactgtcctgaagaaggccctcgacgaggaaacaagatcccacgaggcccaggtgcaagagatgaggcagaaacatgcccaggccgtcgaggaactgaccgagcagctcgagcagttcaagcgggccaaagccaacctggacaaaaacaagcagaccctcgagaaagagaacgccgatctggccggcgaactgagagttctcggacaggccaaacaagaggtggaacacaagaaaaagaaactcgaagctcaggtccaagagctgcagagcaagtgtagcgacggcgaaagagccagagctgagctgaatgacaaggtgcacaaactgcagaatgaggtggaaagcgtgacaggcatgctgaacgaggccgagggcaaagccatcaagctggctaaggatgtggcctctctgagcagccagctccaggacactcaagaattgctgcaagaagagacacggcagaaactgaacgtgtccaccaagctgcgccagctcgaagaggaaagaaatagcctgcaggaccagctggacgaagagatggaagccaagcagaacctggaacggcacatcagcaccctgaacatccagctgtccgactccaagaagaagctgcaggatttcgccagcaccgtcgaggctctggaagagggcaaaaagcggttccagaaagagatcgagaatctgacccagcagtatgaggaaaaggccgctgcctacgacaagctcgagaaaacaaagaaccggctgcagcaagagttggacgacctggtggtcgacctggataaccagagacagctggtgtctaatctcgagaagaagcagcggaagttcgatcagctgctggccgaagagaagaacatcagctctaagtacgccgacgagcgggacagagcagaagccgaagccagagagaaagaaacaaaggccctgagcctggctcgcgcccttgaagaagcactggaagctaaagaagaattggagcggaccaacaagatgctgaaggccgagatggaagatctggtgtccagcaaggacgacgtgggcaagaatgtgcatgagcttgagaagtccaagcgcgccctggaaacccaaatggaagagatgaagacccagctcgaggaacttgaggatgagctgcaggcaaccgaggacgccaagctgaggctggaagtgaatatgcaggctctgaagggccagttcgagcgcgatctccaggctagggatgagcagaatgaagagaagcggaggcagctccagaggcagctgcacgagtatgagactgagttggaggacgaacggaagcagagagcactggccgctgctgccaagaagaaactggaaggcgacctgaaggacctggaacttcaggccgacagcgccatcaagggcagagaagaggccattaagcagctccgcaagctccaggcacagatgaaggacttccagcgggaacttgaagatgccagagccagccgggatgagatcttcgccaccgccaaagagaatgagaagaaagccaagtctctggaagccgatctgatgcagcttcaagaggacctggctgccgccgagagagctagaaaacaggctgacctggaaaaagaagaactggcagaggaactggcctccagcctgtctggcagaaacgctctgcaggatgagaagcgcagactggaagccagaatcgcccaattggaggaagaacttgaagaggaacagggcaacatggaagctatgagcgacagagtgcggaaggccactcagcaagccgaacagctctctaacgagctggctaccgagagatctaccgcacagaagaacgagagcgctagacagcagttggagcggcagaacaaagagttgcggagcaaactgcatgagatggaaggcgccgtgaagtccaagttcaagagcacaatcgctgccctcgaggccaagatcgctcaactggaagaacaggtggaacaagaggcccgcgaaaagcaggccgccacaaagagcctgaagcagaaagacaaaaagctcaaagaaattctgctccaggtggaagatgagcgcaagatggccgaacagtacaaagaacaggcagaaaagggcaacgcccgcgtgaaacagctgaaacggcaattggaagaggcagaagaagaatcccagcggatcaacgccaaccgccggaaacttcagagagagcttgacgaagccaccgagtccaacgaggccatgggaagagaagtgaacgccctgaagtctaagctgagaggccctccacctcaagagacaagccagtga

SEQ ID NO: 497 - RNA, 5817 nt, synthetic construct
  misc_feature 1..5817: note = Homo sapiens__P35749-4__SMMHC CDS opt3
  source 1..5817: mol_type = other RNA
atggcccagaaaggccagctgagcgacgacgagaagttcctgttcgtggacaagaacttcatcaacagccccgtggctcaggccgattgggccgctaaaagacttgtgtgggtgccctctgagaagcagggatttgaggccgccagcatcaaagaagagaagggcgacgaggtggtggtggaactggtggaaaacggcaagaaagtgaccgtgggcaaagacgacatccagaagatgaaccctccaaagttcagcaaggtcgaggacatggccgagctgacctgtctgaatgaggccagcgtgctgcacaacctgagagagagatacttcagcggcctgatctacacctactccggcctgttctgcgtggtggtcaacccctacaaacatctgcccatctacagcgagaagatcgtggacatgtacaagggcaagaaacggcacgagatgcctccacacatctacgccattgccgacaccgcctacagatccatgctgcaggacagagaggaccagagcatcctgtgtaccggcgaatctggcgccggaaagaccgagaacaccaagaaagtcatccagtacctggccgtggtggccagctctcacaagggaaagaaggacaccagcatcaccggcgagctggaaaaacagctgctgcaggccaatcctatcctggaagccttcggcaacgccaagaccgtgaagaacgacaacagcagcagattcggcaagttcatccgcatcaacttcgacgtgaccggctacatcgtgggcgccaacatcgagacatacctgctggaaaagagccgggccatcagacaggccagagatgagagaaccttccacatcttctactacatgatcgctggcgccaaagaaaagatgcggagcgacctgctgctggaaggcttcaacaactacaccttcctgagcaacggcttcgtgcccattcctgccgctcaggacgatgagatgttccaagagacagtggaagccatggccatcatgggcttcagcgaggaagaacagctgtccatcctgaaggtggtgtcctccgttctgcagctgggcaacatcgtgttcaagaaagagcggaacaccgaccaggccagcatgcccgataataccgccgctcagaaagtgtgccacctgatgggcatcaacgtgaccgacttcacccggtccattctgacccctcggatcaaagtgggcagagatgtggtgcagaaggcccagacaaaagagcaggccgactttgccgtggaagctctggccaaggccacctacgagagactgttccggtggatcctgaccagagtgaacaaggccctggacaagacccatagacagggcgccagcttcctgggcatcctggatattgccggcttcgagatctttgaagtgaacagcttcgagcagctgtgcatcaattacaccaacgagaagctccagcagctctttaaccacaccatgttcatcctcgagcaagaggaataccagcgcgagggcatcgagtggaatttcatcgacttcggcctggacctgcagccttgcatcgagctgattgagcggcctaacaaccctcctggcgttctggctctgctggacgaggaatgctggttccctaaggccaccgacaagagcttcgtggaaaagctgtgcaccgagcagggctctcaccccaagttccagaagcctaagcagctgaaggataagaccgagttcagcatcatccactacgccggcaaggtggactacaatgcctctgcctggctgaccaagaacatggaccctctgaacgacaatgtgaccagcctgctgaacgccagcagcgacaagtttgtggccgacctgtggaaggacgtggacagaatcgttggcctggatcagatggccaagatgaccgagagcagcctgcctagcgccagcaagaccaaaaagggcatgttcagaaccgtgggccagctgtacaaagagcagctgggaaagctgatgaccacactgcggaacacaacccctaacttcgtgcggtgcatcatccccaaccacgagaagagatccggcaagctggatgccttcctggtgctggaacagctgagatgcaacggcgtgctcgagggaatcagaatctgcagacagggcttccccaaccggattgtgtttcaagagttccggcagcgctacgagatcctggccgccaatgccattcctaagggcttcatggatggcaagcaggcctgtatcctgatgatcaaagccctggaactggaccccaacctgtacagaatcggccagagcaagatcttcttccggactggcgtgctggcccatctggaagaagagagggacctgaagatcaccgacgtgatcatggcctttcaggccatgtgcagaggctacctggccagaaaagccttcgccaagaggcagcagcagctcaccgccatgaaagtgatccagagaaactgcgccgcctacctgaagctgagaaactggcaatggtggcggctgttcaccaaagtgaagcccctgctgcaagtgaccagacaagaggaagagatgcaggctaaagaggacgagctgcaaaagaccaaagagcggcagcagaaggctgagaacgagctgaaagaactggaacagaagcacagccagctgaccgaggaaaagaacctgctccaagagcaactgcaggccgagacagagctgtatgccgaggccgaagaaatgagagtccggctggccgctaagaagcaagagctggaagagattctgcacgaaatggaagcccgcctcgaagaagaagaggacagaggccaacagctgcaggctgagcggaagaaaatggcccagcagatgctggacctcgaggaacagcttgaggaagaggaagccgccagacagaaactgcagctcgaaaaagtgacagccgaggccaaaatcaagaagctcgaggacgagattctggtcatggacgaccagaacaacaagctgagcaaagagaggaagctcctggaagaacggatcagcgacctgaccaccaacctggctgaggaagaagaaaaggccaagaacctgaccaagctgaagaacaagcacgagagcatgatcagcgaactggaagtgcggctgaagaaagaggaaaagtcccggcaagaactcgagaagctgaagcggaagctggaaggggatgccagcgatttccacgagcagattgccgatctgcaggcccagatcgccgaactgaaaatgcagctggccaagaaagaagaggaactccaggctgccctggccagactggatgatgagatcgcccagaagaacaacgccctcaagaagatccgggaactcgagggccacatctccgacctgcaagaggatctggacagcgaaagggccgccagaaacaaggccgagaagcagaagagagatctgggcgaagaacttgaggccctgaaaaccgaactcgaagataccctggacagcaccgccacacagcaagaactgcgggccaagcgggaacaagaagtgactgtcctgaagaaggccctcgacgaggaaacaagatcccacgaggcccaggtgcaagagatgaggcagaaacatgcccaggccgtcgaggaactgaccgagcagctcgagcagttcaagcgggccaaagccaacctggacaaaaacaagcagaccctcgagaaagagaacgccgatctggccggcgaactgagagttctcggacaggccaaacaagaggtggaacacaagaaaaagaaactcgaagctcaggtccaagagctgcagagcaagtgtagcgacggcgaaagagccagagctgagctgaatgacaaggtgcacaaactgcagaatgaggtggaaagcgtgacaggcatgctgaacgaggccgagggcaaagccatcaagctggctaaggatgtggcctctctgagcagccagctccaggacactcaagaattgctgcaagaagagacacggcagaaactgaacgtgtccaccaagctgcgccagctcgaagaggaaagaaatagcctgcaggaccagctggacgaagagatggaagccaagcagaacctggaacggcacatcagcaccctgaacatccagctgtccgactccaagaagaagctgcaggatttcgccagcaccgtcgaggctctggaagagggcaaaaagcggttccagaaagagatcgagaatctgacccagcagtatgaggaaaaggccgctgcctacgacaagctcgagaaaacaaagaaccggctgcagcaagagttggacgacctggtggtcgacctggataaccagagacagctggtgtctaatctcgagaagaagcagcggaagttcgatcagctgctggccgaagagaagaacatcagctctaagtacgccgacgagcgggacagagcagaagccgaagccagagagaaagaaacaaaggccctgagcctggctcgcgcccttgaagaagcactggaagctaaagaagaattggagcggaccaacaagatgctgaaggccgagatggaagatctggtgtccagcaaggacgacgtgggcaagaatgtgcatgagcttgagaagtccaagcgcgccctggaaacccaaatggaagagatgaagacccagctcgaggaacttgaggatgagctgcaggcaaccgaggacgccaagctgaggctggaagtgaatatgcaggctctgaagggccagttcgagcgcgatctccaggctagggatgagcagaatgaagagaagcggaggcagctccagaggcagctgcacgagtatgagactgagttggaggacgaacggaagcagagagcactggccgctgctgccaagaagaaactggaaggcgacctgaaggacctggaacttcaggccgacagcgccatcaagggcagagaagaggccattaagcagctccgcaagctccaggcacagatgaaggacttccagcgggaacttgaagatgccagagccagccgggatgagatcttcgccaccgccaaagagaatgagaagaaagccaagtctctggaagccgatctgatgcagcttcaagaggacctggctgccgccgagagagctagaaaacaggctgacctggaaaaagaagaactggcagaggaactggcctccagcctgtctggcagaaacgctctgcaggatgagaagcgcagactggaagccagaatcgcccaattggaggaagaacttgaagaggaacagggcaacatggaagctatgagcgacagagtgcggaaggccactcagcaagccgaacagctctctaacgagctggctaccgagagatctaccgcacagaagaacgagagcgctagacagcagttggagcggcagaacaaagagttgcggagcaaactgcatgagatggaaggcgccgtgaagtccaagttcaagagcacaatcgctgccctcgaggccaagatcgctcaactggaagaacaggtggaacaagaggcccgcgaaaagcaggccgccacaaagagcctgaagcagaaagacaaaaagctcaaagaaattctgctccaggtggaagatgagcgcaagatggccgaacagtacaaagaacaggcagaaaagggcaacgcccgcgtgaaacagctgaaacggcaattggaagaggcagaagaagaatcccagcggatcaacgccaaccgccggaaacttcagagagagcttgacgaagccaccgagtccaacgaggccatgggaagagaagtgaacgccctgaagtctaagctgagaggccctccacctcaagagacaagccagtga

SEQ ID NO: 498 - RNA, 1338 nt, synthetic construct
  misc_feature 1..1338: note = Homo sapiens__P35749-1__SMMHC(1527-1972) CDS opt3
  source 1..1338: mol_type = other RNA
gtgcatgagcttgagaagtccaagcgcgccctggaaacccaaatggaagagatgaagacccagctcgaggaacttgaggatgagctgcaggcaaccgaggacgccaagctgaggctggaagtgaatatgcaggctctgaagggccagttcgagcgcgatctccaggctagggatgagcagaatgaagagaagcggaggcagctccagaggcagctgcacgagtatgagactgagttggaggacgaacggaagcagagagcactggccgctgctgccaagaagaaactggaaggcgacctgaaggacctggaacttcaggccgacagcgccatcaagggcagagaagaggccattaagcagctccgcaagctccaggcacagatgaaggacttccagcgggaacttgaagatgccagagccagccgggatgagatcttcgccaccgccaaagagaatgagaagaaagccaagtctctggaagccgatctgatgcagcttcaagaggacctggctgccgccgagagagctagaaaacaggctgacctggaaaaagaagaactggcagaggaactggcctccagcctgtctggcagaaacgctctgcaggatgagaagcgcagactggaagccagaatcgcccaattggaggaagaacttgaagaggaacagggcaacatggaagctatgagcgacagagtgcggaaggccactcagcaagccgaacagctctctaacgagctggctaccgagagatctaccgcacagaagaacgagagcgctagacagcagttggagcggcagaacaaagagttgcggagcaaactgcatgagatggaaggcgccgtgaagtccaagttcaagagcacaatcgctgccctcgaggccaagatcgctcaactggaagaacaggtggaacaagaggcccgcgaaaagcaggccgccacaaagagcctgaagcagaaagacaaaaagctcaaagaaattctgctccaggtggaagatgagcgcaagatggccgaacagtacaaagaacaggcagaaaagggcaacgcccgcgtgaaacagctgaaacggcaattggaagaggcagaagaagaatcccagcggatcaacgccaaccgccggaaacttcagagagagcttgacgaagccaccgagtccaacgaggccatgggaagagaagtgaacgccctgaagtctaagctgcggagaggcaacgaaaccagctttgtgccttctcggagatctggcggcagacgcgtgatcgaaaatgccgatggatcagaggaagaaaccgacaccagggacgccgacttcaatggcacaaaggcctccgag

SEQ ID NO: 499 - RNA, 1053 nt, synthetic construct
  misc_feature 1..1053: note = Homo sapiens__P35749-1__SMMHC(1527-1877) CDS opt3
  source 1..1053: mol_type = other RNA
gtgcatgagcttgagaagtccaagcgcgccctggaaacccaaatggaagagatgaagacccagctcgaggaacttgaggatgagctgcaggcaaccgaggacgccaagctgaggctggaagtgaatatgcaggctctgaagggccagttcgagcgcgatctccaggctagggatgagcagaatgaagagaagcggaggcagctccagaggcagctgcacgagtatgagactgagttggaggacgaacggaagcagagagcactggccgctgctgccaagaagaaactggaaggcgacctgaaggacctggaacttcaggccgacagcgccatcaagggcagagaagaggccattaagcagctccgcaagctccaggcacagatgaaggacttccagcgggaacttgaagatgccagagccagccgggatgagatcttcgccaccgccaaagagaatgagaagaaagccaagtctctggaagccgatctgatgcagcttcaagaggacctggctgccgccgagagagctagaaaacaggctgacctggaaaaagaagaactggcagaggaactggcctccagcctgtctggcagaaacgctctgcaggatgagaagcgcagactggaagccagaatcgcccaattggaggaagaacttgaagaggaacagggcaacatggaagctatgagcgacagagtgcggaaggccactcagcaagccgaacagctctctaacgagctggctaccgagagatctaccgcacagaagaacgagagcgctagacagcagttggagcggcagaacaaagagttgcggagcaaactgcatgagatggaaggcgccgtgaagtccaagttcaagagcacaatcgctgccctcgaggccaagatcgctcaactggaagaacaggtggaacaagaggcccgcgaaaagcaggccgccacaaagagcctgaagcagaaagacaaaaagctcaaagaaattctgctccaggtggaagatgagcgcaagatggccgaacagtacaaagaacaggcagaaaagggcaacgcc

SEQ ID NO: 500 - RNA, 492 nt, synthetic construct
  misc_feature 1..492: note = Homo sapiens__P35749-1__SMMHC(1809-1972) CDS opt3
  source 1..492: mol_type = other RNA
aagtccaagttcaagagcacaatcgctgccctcgaggccaagatcgctcaactggaagaacaggtggaacaagaggcccgcgaaaagcaggccgccacaaagagcctgaagcagaaagacaaaaagctcaaagaaattctgctccaggtggaagatgagcgcaagatggccgaacagtacaaagaacaggcagaaaagggcaacgcccgcgtgaaacagctgaaacggcaattggaagaggcagaagaagaatcccagcggatcaacgccaaccgccggaaacttcagagagagcttgacgaagccaccgagtccaacgaggccatgggaagagaagtgaacgccctgaagtctaagctgcggagaggcaacgaaaccagctttgtgccttctcggagatctggcggcagacgcgtgatcgaaaatgccgatggatcagaggaagaaaccgacaccagggacgccgacttcaatggcacaaaggcctccgag

SEQ ID NO: 501 - RNA, 207 nt, synthetic construct
  misc_feature 1..207: note = Homo sapiens__P35749-1__SMMHC(1809-1877) CDS opt3
  source 1..207: mol_type = other RNA
aagtccaagttcaagagcacaatcgctgccctcgaggccaagatcgctcaactggaagaacaggtggaacaagaggcccgcgaaaagcaggccgccacaaagagcctgaagcagaaagacaaaaagctcaaagaaattctgctccaggtggaagatgagcgcaagatggccgaacagtacaaagaacaggcagaaaagggcaacgcc

SEQ ID NO: 502 - RNA, 69 nt, synthetic construct
  misc_feature 1..69: note = Artificial____Lifeact CDS opt3
  source 1..69: mol_type = other RNA
ggagtggccgacctgatcaagaagttcgagagcatcagcaaagaagagggcgaccctccagtggccaca

SEQ ID NO: 503 - RNA, 51 nt, synthetic construct
  misc_feature 1..51: note = Saccharomyces cerevisiae S288C__NP_014882.4__Lifeact(1-17) CDS opt3
  source 1..51: mol_type = other RNA
atgggagtggccgacctgatcaagaagttcgagagcatcagcaaagaagag

SEQ ID NO: 504 - RNA, 2481 nt, synthetic construct
  misc_feature 1..2481: note = Homo sapiens__Q16665-1__HIF1alpha CDS opt3
  source 1..2481: mol_type = other RNA
atggaaggtgccggcggagccaacgacaagaagaagatcagcagcgagcggcggaaagagaagtctagggacgctgccagaagcaggcggagcaaagaaagcgaggtgttctacgagctggcccaccaactgcctctgcctcacaatgtgtccagccacctggataaggccagcgtgatgagactgaccatcagctacctgagagtgcggaagctgctggatgccggcgatctggacatcgaggacgatatgaaggcccagatgaactgcttctacctgaaggccctggacggcttcgtgatggtgctgaccgatgacggcgacatgatctacatcagcgacaacgtgaacaagtacatggggctgacccagttcgagctgacaggccacagcgtgttcgacttcacacacccctgcgaccacgaagagatgagagagatgctgacccaccggaacggcctggtcaagaagggcaaagagcagaatacccagcggtcattcttcctgcggatgaagtgcaccctgaccagcaggggcagaaccatgaacatcaagagcgccacatggaaagtgctgcactgcaccggacacatccacgtgtacgacaccaacagcaaccagcctcagtgcggctacaagaaacctcctatgacctgcctggtgctgatctgcgagcccattcctcatcctagcaacatcgagatccctctggacagcaagaccttcctgagcagacacagcctggacatgaagttcagctactgcgacgagcggatcaccgagctgatgggctatgagcctgaagaactgctgggccgcagcatctacgagtactatcacgccctggacagcgaccacctgaccaagacacaccacgacatgttcaccaagggccaagtgaccaccggccagtacagaatgctggccaagcgcggaggctacgtgtgggttgaaacacaggccaccgtgatctacaacaccaagaactcccagccacagtgcatcgtgtgcgtgaactacgtggtgtccggcatcatccagcacgacctgatcttcagcctgcagcagaccgagtgcgtgctgaagcctgtggaaagcagcgacatgaagatgacccagctgtttaccaaggtggaatccgaggacaccagcagcctgttcgacaagctgaagaaagagcccgacgctctgacactgctggctccagctgctggcgataccatcatcagcctggatttcggcagcaacgacaccgagacagacgaccagcagctcgaggaagtgcccctgtacaacgacgtgatgctgccctctccaaacgagaagctgcagaacatcaacctggccatgtcacccctgcctaccgccgagacacctaagcctctgagaagctctgccgatcctgctctgaatcaagaggtggccctgaagctggaacccaatcctgagagcctggaactgagcttcaccatgcctcagatccaggatcagaccccatctcctagcgacggcagcacaagacagtctagccccgagcctaatagccccagcgagtactgcttttacgtggactccgacatggtcaacgagttcaaactggaactggtggaaaagctgttcgccgaggataccgaggccaagaatcccttcagcacccaagacaccgacctggacctggaaatgctggcaccttacatccccatggacgacgacttccagctgcggagcttcgatcagctgagccctctggaatctagcagcgcctctccagagtctgcctctccacagagcaccgtgaccgtgtttcagcagacccagatccaagagccaaccgccaatgccaccaccacaaccgccacaacagacgagctgaaaaccgtgaccaaggaccggatggaagatatcaagatcctgatcgctagcccctctcctactcacatccacaaagagacaaccagcgccacaagcagcccctacagagacacccagagcagaaccgcctctcctaacagagccggcaaaggcgtgatcgagcagactgagaagtctcaccctcggagccccaatgtgctgtctgtggctctgagccagagaaccaccgtgcctgaggaagaactgaaccccaagattctggccctgcagaacgcccagcggaagcggaaaatggaacacgacggaagcctgttccaggccgtcggaattggaaccctgctccagcagccagatgatcacgccgctacaacaagcctgagctggaagagagtgaagggctgcaagtccagcgagcagaacggaatggaacagaaaaccatcattctgatccccagcgacctggcctgtagactgctcggccaatctatggacgagagcggactgcctcagctgaccagctacgactgcgaagtgaacgcccctatccagggcagcagaaacctgctgcaaggcgaggaactgctgcgcgctctggaccaagtgaactga

SEQ ID NO: 505 - RNA, 81 nt, synthetic construct
  misc_feature 1..81: note = Homo sapiens__Q16665-1__HIF1alpha(549-575) CDS opt3
  source 1..81: mol_type = other RNA
cccttcagcacccaagacaccgacctggacctggaaatgctggcaccttacatccccatggacgacgacttccagctgcgg

SEQ ID NO: 506 - RNA, 45 nt, synthetic construct
  misc_feature 1..45: note = Artificial____Linker CDS opt3
  source 1..45: mol_type = other RNA
ggaggaagcggaggttctggcggtagtggtggatctggcggagga

SEQ ID NO: 507 - RNA, 1362 nt, synthetic construct
  misc_feature 1..1362: note = Homo sapiens__Q01196-1__RUNX1(K83E_R174Q) CDS opt3
  source 1..1362: mol_type = other RNA
atgagaatccccgtggatgccagcaccagcagaagattcacccctcctagcaccgctctgagccctggcaagatgtctgaagctctgcctctgggagcacctgatgctggtgcagctctggccggaaaactgagaagcggcgacagatccatggtggaagtgctggctgatcaccccggcgaacttgtgcggacagacagccctaatttcctgtgcagcgtgctgcctacacactggcggtgcaatgagacactgcctatcgccttcaaggtggtggccctgggagatgtgcctgatggcacactggttacagtgatggccggcaacgacgagaactacagcgccgagctgagaaatgccaccgccgccatgaagaaccaggtggccagattcaacgacctgagattcgtgggcagaagcggcaggggcaagagctttaccctgaccatcaccgtgttcaccaatcctccacaggtggcaacctaccaccgggccatcaagatcacagtggacggccctcaagagcccagacggcacagacagaaactggacgaccagaccaagcctggcagcctgagctttagcgagagactgagcgagctggaacagctgagaagaaccgccatgcgggtgtccccacatcaccctgctcctacacctaatcctcgggccagcctgaatcacagcaccgcctttaatccccagcctcagagccagatgcaggacaccagacagattcagccttctccaccttggagctacgaccagagctaccagtacctgggctctatcgcctctcctagcgtgcaccctgccacacctattagtcctggcagagccagcggcatgacaacactgtctgccgagctgtccagcagactgagcacagcccctgatctgaccgccttcagcgaccctagacagttccctgctctgcccagcatctctgaccccagaatgcattaccctggcgccttcacatacagccccacacctgtgacaagcggcatcggcattggcatgtctgccatgggaagcgccaccagataccacacctacctgcctccaccttatcctggcagctctcaggctcaaggcggcccttttcaggccagctctccttcctaccacctgtactatggcgccagcgccggctcctaccagttttctatggttggaggcgagcggagccctcctagaatcctgcctccttgtaccaacgccagcacaggatctgccctgctgaatcccagcctgcctaatcagagcgacgtggtggaagccgagggcagccatagcaacagccctaccaatatggcccctagcgccagactggaagaggccgtttggaggccttactga

SEQ ID NO: 508 - RNA, 1362 nt, synthetic construct
  misc_feature 1..1362: note = Homo sapiens__Q01196-1__RUNX1 CDS opt3
  source 1..1362: mol_type = other RNA
atgagaatccccgtggatgccagcaccagcagaagattcacccctcctagcaccgctctgagccctggcaagatgtctgaagctctgcctctgggagcacctgatgctggtgcagctctggccggaaaactgagaagcggcgacagatccatggtggaagtgctggctgatcaccccggcgaacttgtgcggacagacagccctaatttcctgtgcagcgtgctgcctacacactggcggtgcaacaagacactgcctatcgccttcaaggtggtggctctgggagatgtgcctgatggcacactggtcacagtgatggccggcaacgacgagaattacagcgccgagctgagaaatgccaccgccgccatgaagaaccaggtggccagattcaacgacctgagattcgtgggcagaagcggcaggggcaagagctttaccctgaccatcaccgtgttcaccaatcctccacaggtggcaacctaccaccgggccatcaagatcaccgtggatggccctagagagcccagacggcacagacagaaactggacgaccagaccaagcctggcagcctgagctttagcgagagactgagcgagctggaacagctgagaagaaccgccatgcgggtgtccccacatcaccctgctcctacacctaatcctcgggccagcctgaatcacagcaccgcctttaatccccagcctcagagccagatgcaggacaccagacagattcagccttctccaccttggagctacgaccagagctaccagtacctgggctctatcgcctctcctagcgtgcaccctgccacacctattagtcctggcagagccagcggcatgacaacactgtctgccgagctgtccagcagactgagcacagcccctgatctgaccgccttcagcgaccctagacagttccctgctctgcccagcatctctgaccccagaatgcattaccctggcgccttcacatacagccccacacctgtgacaagcggcatcggcattggcatgtctgccatgggaagcgccaccagataccacacctacctgcctccaccttatcctggcagctctcaggctcaaggcggcccttttcaggccagctctccttcctaccacctgtactatggcgccagcgccggctcctaccagttttctatggttggaggcgagcggagccctcctagaatcctgcctccttgtaccaacgccagcacaggatctgccctgctgaatcccagcctgcctaatcagagcgacgtggtggaagccgagggcagccatagcaacagccctaccaatatggcccctagcgccagactggaagaggccgtttggaggccttactga

SEQ ID NO: 509 - RNA, 1443 nt, synthetic construct
  misc_feature 1..1443: note = Homo sapiens__Q01196-8__RUNX1 CDS opt3
  source 1..1443: mol_type = other RNA
atggccagcgacagcatcttcgagagcttccccagctatccccagtgcttcatgcgcgagtgtatcctgggcatgaaccccagcagagatgtgcacgatgccagcaccagcagacggtttacccctcctagcacagctctgagccctggcaagatgtctgaagccctgcctctgggagcacctgatgctggtgcagctctggccggaaaactgagaagcggcgacagatccatggtggaagtgctggctgatcaccccggcgaacttgtgcggacagacagccctaatttcctgtgcagcgtgctgcctacacactggcggtgcaacaagacactgcctatcgccttcaaggtggtggctctgggagatgtgcctgatggcacactggtcacagtgatggccggcaacgacgagaattacagcgccgagctgagaaatgccaccgccgccatgaagaaccaggtggccagattcaacgacctgagattcgtgggcagaagcggcagaggcaagagcttcaccctgaccatcaccgtgttcaccaatcctccacaggtggcaacctaccaccgggccatcaagatcaccgtggatggccctagagagcccagacggcacagacagaaactggacgaccagaccaagcctggcagcctgagctttagcgagagactgagcgagctggaacagctgagaagaaccgccatgcgggtgtccccacatcaccctgctcctacacctaatcctcgggccagcctgaatcacagcaccgcctttaatccccagcctcagagccagatgcaggacaccagacagattcagccctctccaccttggagctacgaccagagctaccagtacctgggctctatcgcctctcctagcgtgcaccctgccacacctattagtcctggcagagccagcggcatgacaacactgtctgccgagctgtccagcagactgagcactgcccctgatctgaccgccttcagcgaccctagacagttccctgctctgcccagcatctctgaccccagaatgcattaccctggcgccttcacatacagccccacacctgtgacaagcggcatcggcattggcatgtctgccatgggaagcgccaccagataccacacctacctgcctccaccttatcctggcagctctcaggctcaaggcggcccttttcaggccagctctccttcctaccacctgtactatggcgccagcgccggctcctaccagttttctatggttggaggcgagcggagccctcctagaatcctgcctccttgtaccaacgccagcacaggatctgccctgctgaatcccagcctgcctaatcagagcgacgtggtggaagccgagggcagccatagcaacagccctaccaatatggcccctagcgccagactggaagaggccgtttggaggccttactga

SEQ ID NO: 510 - RNA, 1419 nt, synthetic construct
  misc_feature 1..1419: note = Homo sapiens__Q01196-2__RUNX1 CDS opt3
  source 1..1419: mol_type = other RNA
atgagaatccccgtggatgccagcaccagcagaagattcacccctcctagcaccgctctgagccctggcaagatgtctgaagctctgcctctgggagcacctgatgctggtgcagctctggccggaaaactgagaagcggcgacagatccatggtggaagtgctggctgatcaccccggcgaacttgtgcggacagacagccctaatttcctgtgcagcgtgctgcctacacactggcggtgcaacaagacactgcctatcgccttcaaggtggtggctctgggagatgtgcctgatggcacactggtcacagtgatggccggcaacgacgagaattacagcgccgagctgagaaatgccaccgccgccatgaagaaccaggtggccagattcaacgacctgagattcgtgggcagaagcggcaggggcaagagctttaccctgaccatcaccgtgttcaccaatcctccacaggtggcaacctaccaccgggccatcaagatcaccgtggatggccctagagagcccagacggcacagacagaaactggacgaccagaccaagcctggcagcctgagctttagcgagagactgagcgagctggaacagctgagaagaaccgccatgcgggtgtccccacatcaccctgctcctacacctaatcctcgggccagcctgaatcacagcaccgcctttaatccccagcctcagagccagatgcaggacaccagacagattcagccttctccaccttggagctacgaccagagctaccagtacctgggctctatcgcctctcctagcgtgcaccctgccacacctattagtcctggcagagccagcggcatgacaacactgtctgccgagctgtccagcagactgagcacagcccctgatctgaccgccttcagcgaccctagacagttccctgctctgcccagcatctctgaccccagaatgcattaccctggcgccttcacatacagccccacacctgtgacaagcggcatcggcattggcatgtctgccatgggaagcgccaccagataccacacctacctgcctccaccttatcctggcagctctcaggctcaaggcggcccttttcaggccagctctccttcctaccacctgtactatggcgccagcgccggctcctaccagttttctatggttggaggcgagcggagccctcctagaatcctgcctccttgtaccaacgccagcacaggatctgccctgctgaatcccagcctgcctaatcagagcgacgtggtggaagccgagggcagccatagcaacagccctaccaatatgggcggagccagctgctctagacaggccagaagagatcctggaccttgggccagaacaccctcttggggaagaggcagacccaccgacagaatctccctgtga

SEQ ID NO: 511 - RNA, 1419 nt, synthetic construct
  misc_feature 1..1419: note = Homo sapiens__CAA56092.1__RUNX1 CDS opt3
  source 1..1419: mol_type = other RNA
atgagaatccccgtggatgccagcaccagcagaagattcacccctcctagcaccgctctgagccctggcaagatgtctgaagctctgcctctgggagcacctgatgctggtgcagctctggccggaaaactgagaagcggcgacagatccatggtggaagtgctggctgatcaccccggcgaacttgtgcggacagacagccctaatttcctgtgcagcgtgctgcctacacactggcggtgcaacaagacactgcctatcgccttcaaggtggtggctctgggagatgtgcctgatggcacactggtcacagtgatggccggcaacgacgagaattacagcgccgagctgagaaatgccaccgccgccatgaagaaccaggtggccagattcaacgacctgagattcgtgggcagaagcggcaggggcaagagctttaccctgaccatcaccgtgttcaccaatcctccacaggtggcaacctaccaccgggccatcaagatcaccgtggatggccctagagagcccagacggcacagacagaaactggacgaccagaccaagcctggcagcctgagctttagcgagagactgagcgagctggaacagctgagaagaaccgccatgcgggtgtccccacatcaccctgctcctacacctaatcctcgggccagcctgaatcacagcaccgcctttaatccccagcctcagagccagatgcaggacaccagacagattcagccttctccaccttggagctacgaccagagctaccagtacctgggctctatcgcctctcctagcgtgcaccctgccacacctattagtcctggcagagccagcggcatgacaacactgtctgccgagctgtccagcagactgagcacagcccctgatctgaccgccttcagcgaccctagacagttccctgctctgcccagcatctctgaccccagaatgcattaccctggcgccttcacatacagccccacacctgtgacaagcggcatcggcattggcatgtctgccatgggaagcgccaccagataccacacctacctgcctccaccttatcctggcagctctcaggctcaaggcggcccttttcaggccagctctccttcctaccacctgtactatggcgccagcgccggctcctaccagttttctatggttggaggcgagcggagccctcctagaatcctgcctccttgtaccaacgccagcacaggatctgccctgctgaatcccagcctgcctaatcagagcgacgtggtggaagccgagggcagacacagaaacagccctaccaatatgggcggagccagctgctctagacaggccagaagagatcctggaccttgggccagaacaccctcttggggaagaggcagacccaccgacagaatctccctgtga

SEQ ID NO: 512 - RNA, 1407 nt, synthetic construct
  misc_feature 1..1407: note = Homo sapiens__Q01196-10__RUNX1 CDS opt3
  source 1..1407: mol_type = other RNA
atgcctgctgctcctagaggacctgctcaaggcgaagccgccgctagaaccagatctagagatgccagcaccagccggcggtttacccctccatctacagctctgagccccggcaagatgtctgaagctctgcctctgggagcacctgatgctggtgcagctctggccggaaaactgagaagcggcgacagatccatggtggaagtgctggctgatcaccccggcgaacttgtgcggacagacagccctaatttcctgtgcagcgtgctgcctacacactggcggtgcaacaagacactgcctatcgccttcaaggtggtggctctgggagatgtgcctgatggcacactggtcacagtgatggccggcaacgacgagaattacagcgccgagctgagaaatgccaccgccgccatgaagaaccaggtggccagattcaacgacctgagattcgtgggcagaagcggcaggggcaagagctttaccctgaccatcaccgtgttcaccaatcctccacaggtggcaacctaccaccgggccatcaagatcaccgtggatggccctagagagcccagacggcacagacagaaactggacgaccagaccaagcctggcagcctgagctttagcgagagactgagcgagctggaacagctgagaagaaccgccatgcgggtgtccccacatcaccctgctcctacacctaatcctcgggccagcctgaatcacagcaccgcctttaatccccagcctcagagccagatgcaggacaccagacagattcagccctctccaccttggagctacgaccagagctaccagtacctgggctctatcgcctctcctagcgtgcaccctgccacacctattagccctggcagagccagcggcatgacaacactgtctgccgagctgtccagcagactgagcacagcccctgatctgaccgccttcagcgaccctagacagttccctgctctgcccagcatctctgaccccagaatgcattaccctggcgccttcacatacagccccacacctgtgacaagcggcatcggcattggcatgtctgccatgggaagcgccaccagataccacacctacctgcctccaccttatcctggcagctctcaggcacaaggcggcccttttcaggccagctctccttcctaccacctgtactatggcgccagcgccggctcctaccagttttctatggttggaggcgagcggagccctcctagaatcctgcctccttgtaccaacgccagcacaggatctgccctgctgaatcccagcctgcctaatcagagcgacgtggtggaagccgagggcagccatagcaacagccctaccaatatggcccctagcgccagactggaagaggccgtttggaggccttactga

SEQ ID NO: 513 - RNA, 1371 nt, synthetic construct
  misc_feature 1..1371: note = Homo sapiens__Q01196-9__RUNX1 CDS opt3
  source 1..1371: mol_type = other RNA
atgaaccccagcagagatgtgcacgatgccagcaccagcagacggtttacccctcctagcacagctctgagccctggcaagatgtctgaagccctgcctctgggagcacctgatgctggtgcagctctggccggaaaactgagaagcggcgacagatccatggtggaagtgctggctgatcaccccggcgaacttgtgcggacagacagccctaatttcctgtgcagcgtgctgcctacacactggcggtgcaacaagacactgcctatcgccttcaaggtggtggctctgggagatgtgcctgatggcacactggtcacagtgatggccggcaacgacgagaattacagcgccgagctgagaaatgccaccgccgccatgaagaaccaggtggccagattcaacgacctgagattcgtgggcagaagcggcagaggcaagagcttcaccctgaccatcaccgtgttcaccaatcctccacaggtggcaacctaccaccgggccatcaagatcaccgtggatggccctagagagcccagacggcacagacagaaactggacgaccagaccaagcctggcagcctgagctttagcgagagactgagcgagctggaacagctgagaagaaccgccatgcgggtgtccccacatcaccctgctcctacacctaatcctcgggccagcctgaatcacagcaccgcctttaatccccagcctcagagccagatgcaggacaccagacagattcagccctctccaccttggagctacgaccagagctaccagtacctgggctctatcgcctctcctagcgtgcaccctgccacacctattagtcctggcagagccagcggcatgacaacactgtctgccgagctgtccagcagactgagcactgcccctgatctgaccgccttcagcgaccctagacagttccctgctctgcccagcatctctgaccccagaatgcattaccctggcgccttcacatacagccccacacctgtgacaagcggcatcggcattggcatgtctgccatgggaagcgccaccagataccacacctacctgcctccaccttatcctggcagctctcaggctcaaggcggcccttttcaggccagctctccttcctaccacctgtactatggcgccagcgccggctcctaccagttttctatggttggaggcgagcggagccctcctagaatcctgcctccttgtaccaacgccagcacaggatctgccctgctgaatcccagcctgcctaatcagagcgacgtggtggaagccgagggcagccatagcaacagccctaccaatatggcccctagcgccagactggaagaggccgtttggaggccttactga

SEQ ID NO: 514 - RNA, 1362 nt, synthetic construct
  misc_feature 1..1362: note = Homo sapiens__AAA51720.1__RUNX1 CDS opt3
  source 1..1362: mol_type = other RNA
atgagaatccccgtggatgccagcaccagcagaagattcacccctcctagcaccgctctgagccctggcaagatgtctgaagctctgcctctgggagcacctgatgctggtgcagctctggccggaaaactgagaagcggcgacagatccatggtggaagtgctggctgatcaccccggcgaacttgtgcggacagacagccctaatttcctgtgcagcgtgctgcctacacactggcggtgcaacaagacactgcctatcgccttcaaggtggtggctctgggagatgtgcctgatggcacactggtcacagtgatggccggcaacgacgagaattacagcgccgagctgagaaatgccaccgccgccatgaagaaccaggtggccagattcaacgacctgagattcgtgggcagaagcggcaggggcaagagctttaccctgaccatcaccgtgttcaccaatcctccacaggtggcaacctaccaccgggccatcaagatcaccgtggatggccctagagagcccagacggcacagacagaaactggacgaccagaccaagcctggcagcctgagctttagcgagagactgagcgagctggaacagctgagaagaaccgccatgcgggtgtccccacatcaccctgctcctacacctaatcctcgggccagcctgaatcacagcaccgcctttaatccccagcctcagagccagatgcaggacaccagacagattcagccttctccaccttggagctacgaccagagctaccagtacctgggctctatcgcctctcctagcgtgcaccctgccacacctattagtcctggcagagccagcggcatgacaacactgtctgccgagctgtccagcagactgagcacagcccctgatctgaccgccttcagcgaccctagacagttccctgctctgcccagcatctctgaccccagaatgcattaccctggcgccttcacatacagccccacacctgtgacaagcggcatcggcattggcatgtctgccatgggaagcgccaccagataccacacctacctgcctccaccttatcctggcagctctcaggctcaaggcggcccttttcaggccagctctccttcctaccacctgtactatggcgccagcgccggctcctaccagttttctatggttggaggcgagcggagccctcctagaatcctgcctccttgtaccaacgccagcacaggcttcgccctgctgaatcccagtctgcccaatcagagcgacgtggtggaagccgagggcagccatagcaacagccctaccaatatggcccctagcgccagactggaagaggccgtttggaggccttactga

SEQ ID NO: 515 - RNA, 1170 nt, synthetic construct
  misc_feature 1..1170: note = Homo sapiens__H9KVB1__RUNX1 CDS opt3
  source 1..1170: mol_type = other RNA
atgagaatccccgtggatgccagcaccagcagaagattcacccctcctagcaccgctctgagccctggcaagatgtctgaagctctgcctctgggagcacctgatgctggtgcagctctggccggaaaactgagaagcggcgacagatccatggtggaagtgctggctgatcaccccggcgaacttgtgcggacagacagccctaatttcctgtgcagcgtgctgcctacacactggcggtgcaacaagacactgcctatcgccttcaaggtggtggctctgggagatgtgcctgatggcacactggtcacagtgatggccggcaacgacgagaattacagcgccgagctgagaaatgccaccgccgccatgaagaaccaggtggccagattcaacgacctgagattcgtgggcagaagcggcaggggcaagagctttaccctgaccatcaccgtgttcaccaatcctccacaggtggcaacctaccaccgggccatcaagatcaccgtggatggccctagagagccccggaacaccagacagattcagccttctccaccttggagctacgaccagagctaccagtacctgggctctatcgcctctcctagcgtgcaccctgccacacctattagtcctggcagagccagcggcatgacaacactgtctgccgagctgtccagcagactgagcacagcccctgatctgaccgccttcagcgaccctagacagttccctgctctgcccagcatctctgaccccagaatgcattaccctggcgccttcacatacagccccacacctgtgacaagcggcatcggcattggcatgtctgccatgggaagcgccaccagataccacacctacctgcctccaccttatcctggcagctctcaggctcaaggcggcccttttcaggccagctctccttcctaccacctgtactatggcgccagcgccggctcctaccagttttctatggttggaggcgagcggagccctcctagaatcctgcctccttgtaccaacgccagcacaggatctgccctgctgaatcccagcctgcctaatcagagcgacgtggtggaagccgagggcagccatagcaacagccctaccaatatggcccctagcgccagactggaagaggccgtttggaggccttactga

SEQ ID NO: 516 - RNA, 1047 nt, synthetic construct
  misc_feature 1..1047: note = Homo sapiens__Q01196-11__RUNX1 CDS opt3
  source 1..1047: mol_type = other RNA
atggccggcaacgacgagaattacagcgccgagctgagaaatgccaccgccgccatgaagaaccaggtggccagattcaacgacctgagattcgtgggcagaagcggcagaggcaagagcttcaccctgaccatcaccgtgttcaccaatcctccacaggtggcaacctaccaccgggccatcaagatcacagtggacggccctagagagcccagacggcacagacagaaactggacgaccagaccaagcctggcagcctgagctttagcgagagactgagcgagctggaacagctgagaagaaccgccatgcgggtgtccccacatcaccctgctcctacacctaatcctcgggccagcctgaatcacagcaccgcctttaatccccagcctcagagccagatgcaggacaccagacagatccagccttctccaccttggagctacgaccagagctaccagtacctgggctctatcgcctctcctagcgtgcaccctgccacacctattagccctggcagagccagcggcatgacaacactgtctgccgagctgtccagcagactgagcacagcccctgatctgaccgccttcagcgaccctagacagttccctgctctgcccagcatcagcgatcccagaatgcattaccctggcgccttcacatacagccccacacctgtgacaagcggcatcggcattggcatgtctgccatgggaagcgccaccagataccacacctacctgcctccaccttatcctggcagctctcaggctcaaggcggcccttttcaggccagctctccttcctaccacctgtactatggcgccagcgccggctcctaccagttttctatggttggaggcgagcggagccctcctagaatcctgcctccttgtaccaatgccagcacaggcagcgccctgctgaatcccagtctgcctaatcagagcgacgtggtggaagccgagggcagccatagcaacagccctaccaatatggcccctagcgccagactggaagaggccgtttggaggccttactga

SEQ ID NO: 517 - RNA, 774 nt, synthetic construct
  misc_feature 1..774: note = Homo sapiens__Q01196-4__RUNX1 CDS opt3
  source 1..774: mol_type = other RNA
atgagaatccccgtggatgccagcaccagcagaagattcacccctcctagcaccgctctgagccctggcaagatgtctgaagctctgcctctgggagcacctgatgctggtgcagctctggccggaaaactgagaagcggcgacagatccatggtggaagtgctggctgatcaccccggcgaacttgtgcggacagacagccctaatttcctgtgcagcgtgctgcctacacactggcggtgcaacaagacactgcctatcgccttcaaggtggtggctctgggagatgtgcctgatggcacactggtcacagtgatggccggcaacgacgagaattacagcgccgagctgagaaatgccaccgccgccatgaagaaccaggtggccagattcaacgacctgagattcgtgggcagaagcggcaggggcaagagctttaccctgaccatcaccgtgttcaccaatcctccacaggtggcaacctaccaccgggccatcaagatcaccgtggatggccctagagagcccagacggcacagacagaaactggacgaccagaccaagcctggcagcctgagctttagcgagagactgagcgagctggaacagctgagaagaaccgccatgcgggtgtccccacatcaccctgctcctacacctaatcctcgggccagcctgaatcacagcaccgcctttaatccccagcctcagagccagatgcaggacaccagacagattcagccttctccaccttggagctacgaccagagctga

SEQ ID NO: 518 - RNA, 771 nt, synthetic construct
  misc_feature 1..771: note = Homo sapiens__A8MZI9__RUNX1 CDS opt3
  source 1..771: mol_type = other RNA
atgcctgctgctcctagaggacctgctcaaggcgaagccgccgctagaaccagatctagagatgccagcaccagccggcggtttacccctccatctacagctctgagccccggcaagatgtctgaagctctgcctctgggagcacctgatgctggtgcagctctggccggaaaactgagaagcggcgacagatccatggtggaagtgctggctgatcaccccggcgaacttgtgcggacagacagccctaatttcctgtgcagcgtgctgcctacacactggcggtgcaacaagacactgcctatcgccttcaaggtggtggctctgggagatgtgcctgatggcacactggtcacagtgatggccggcaacgacgagaattacagcgccgagctgagaaatgccaccgccgccatgaagaaccaggtggccagattcaacgacctgagattcgtgggcagaagcggcaggggcaagagctttaccctgaccatcaccgtgttcaccaatcctccacaggtggcaacctaccaccgggccatcaagatcaccgtggatggccctagagagcccagacggcacagacagaaactggacgaccagaccaagcctggcagcctgagctttagcgagagactgagcgagctggaacagctgagaagaaccgccatgcgggtgtccccacatcaccctgctcctacacctaatcctcgggccagcctgaatcacagcaccgcctttaatccccagcctcagagccagatgcagtga

SEQ ID NO: 519 - RNA, 753 nt, synthetic construct
  misc_feature 1..753: note = Homo sapiens__Q01196-3__RUNX1 CDS opt3
  source 1..753: mol_type = other RNA
atgagaatccccgtggatgccagcaccagcagaagattcacccctcctagcaccgctctgagccctggcaagatgtctgaagctctgcctctgggagcacctgatgctggtgcagctctggccggaaaactgagaagcggcgacagatccatggtggaagtgctggctgatcaccccggcgaacttgtgcggacagacagccctaatttcctgtgcagcgtgctgcctacacactggcggtgcaacaagacactgcctatcgccttcaaggtggtggctctgggagatgtgcctgatggcacactggtcacagtgatggccggcaacgacgagaattacagcgccgagctgagaaatgccaccgccgccatgaagaaccaggtggccagattcaacgacctgagattcgtgggcagaagcggcaggggcaagagctttaccctgaccatcaccgtgttcaccaatcctccacaggtggcaacctaccaccgggccatcaagatcaccgtggatggccctagagagcccagacggcacagacagaaactggacgaccagaccaagcctggcagcctgagctttagcgagagactgagcgagctggaacagctgagaagaaccgccatgcgggtgtccccacatcaccctgctcctacacctaatcctcgggccagcctgaatcacagcaccgcctttaatccccagcctcagagccagatgcaagaagaggatacagccccttggagatgctga

SEQ ID NO: 520 - RNA, 729 nt, synthetic construct
  misc_feature 1..729: note = Homo sapiens__Q01196-7__RUNX1 CDS opt3
  source 1..729: mol_type = other RNA
atgagaatccccgtggatgccagcaccagcagaagattcacccctcctagcaccgctctgagccctggcaagatgtctgaagctctgcctctgggagcacctgatgctggtgcagctctggccggaaaactgagaagcggcgacagatccatggtggaagtgctggctgatcaccccggcgaacttgtgcggacagacagccctaatttcctgtgcagcgtgctgcctacacactggcggtgcaacaagacactgcctatcgccttcaaggtggtggctctgggagatgtgcctgatggcacactggtcacagtgatggccggcaacgacgagaattacagcgccgagctgagaaatgccaccgccgccatgaagaaccaggtggccagattcaacgacctgagattcgtggacggccccagagagcctagacggcacagacagaaactggacgaccagaccaagcctggcagcctgagctttagcgagagactgagcgagctggaacagctgagaagaaccgccatgcgggtgtccccacatcaccctgctcctacacctaatcctcgggccagcctgaatcacagcaccgcctttaatccccagcctcagagccagatgcaggacaccagacagattcagccttctccaccttggagctacgaccagagctaccagtacctgggctctatcgcctctcctagcgtgcaccctgccacacctatttga

SEQ ID NO: 521 - RNA, 675 nt, synthetic construct
  misc_feature 1..675: note = Homo sapiens__Q01196-5__RUNX1 CDS opt3
  source 1..675: mol_type = other RNA
atgagaatccccgtggatgccagcaccagcagaagattcacccctcctagcaccgctctgagccctggcaagatgtctgaagctctgcctctgggagcacctgatgctggtgcagctctggccggaaaactgagaagcggcgacagatccatggtggaagtgctggctgatcaccccggcgaacttgtgcggacagacagccctaatttcctgtgcagcgtgctgcctacacactggcggtgcaacaagacactgcctatcgccttcaaggtggtggctctgggagatgtgcctgatggcacactggtcacagtgatggccggcaacgacgagaattacagcgccgagctgagaaatgccaccgccgccatgaagaaccaggtggccagattcaacgacctgagattcgtgggcagaagcggcaggggcaagagctttaccctgaccatcaccgtgttcaccaatcctccacaggtggcaacctaccaccgggccatcaagatcaccgtggatggccccagagaaccccggtccaagtgtattcatctgggcctcgtgcaccctcctggctggtatacactgcaggctggaatcctgagggaccacgtgtccgatagcctgggcagcacatttcctccaggcggatggcaggctcccgtgaagcctaaatcttga

SEQ ID NO: 522 - RNA, 567 nt, synthetic construct
  misc_feature 1..567: note = Homo sapiens__Q01196-6__RUNX1 CDS opt3
  source 1..567: mol_type = other RNA
atgagaatccccgtggatgccagcaccagcagaagattcacccctcctagcaccgctctgagccctggcaagatgtctgaagctctgcctctgggagcacctgatgctggtgcagctctggccggaaaactgagaagcggcgacagatccatggtggaagtgctggctgatcaccccggcgaacttgtgcggacagacagccctaatttcctgtgcagcgtgctgcctacacactggcggtgcaacaagacactgcctatcgccttcaaggtggtggctctgggagatgtgcctgatggcacactggtcacagtgatggccggcaacgacgagaattacagcgccgagctgagaaatgccaccgccgccatgaagaaccaggtggccagattcaacgacctgagattcgtgggcagaagcggcaggggcaagagctttaccctgaccatcaccgtgttcaccaatcctccacaggtggcaacctaccaccgggccatcaagatcaccgtggatggccctagagagccccggaatagtctgacctggcctagataccctcacatctga

SEQ ID NO: 523 - RNA, 384 nt, synthetic construct
  misc_feature 1..384: note = Homo sapiens__Q01196-1__RUNX1(1-128) CDS opt3
  source 1..384: mol_type = other RNA
atgagaatccccgtggatgccagcaccagcagaagattcacccctcctagcaccgctctgagccctggcaagatgtctgaagctctgcctctgggagcacctgatgctggtgcagctctggccggaaaactgagaagcggcgacagatccatggtggaagtgctggctgatcaccccggcgaacttgtgcggacagacagccctaatttcctgtgcagcgtgctgcctacacactggcggtgcaacaagacactgcctatcgccttcaaggtggtggctctgggagatgtgcctgatggcacactggtcacagtgatggccggcaacgacgagaattacagcgccgagctgagaaatgccaccgccgccatgaagaaccaggtg

SEQ ID NO: 524 - RNA, 531 nt, synthetic construct
  misc_feature 1..531: note = Homo sapiens__Q01196-1__RUNX1(1-177) CDS opt3
  source 1..531: mol_type = other RNA
atgagaatccccgtggatgccagcaccagcagaagattcacccctcctagcaccgctctgagccctggcaagatgtctgaagctctgcctctgggagcacctgatgctggtgcagctctggccggaaaactgagaagcggcgacagatccatggtggaagtgctggctgatcaccccggcgaacttgtgcggacagacagccctaatttcctgtgcagcgtgctgcctacacactggcggtgcaacaagacactgcctatcgccttcaaggtggtggctctgggagatgtgcctgatggcacactggtcacagtgatggccggcaacgacgagaattacagcgccgagctgagaaatgccaccgccgccatgaagaaccaggtggccagattcaacgacctgagattcgtgggcagaagcggcaggggcaagagctttaccctgaccatcaccgtgttcaccaatcctccacaggtggcaacctaccaccgggccatcaagatcaccgtggatggccctagagagcccaga

SEQ ID NO: 525 - RNA, 723 nt, synthetic construct
  misc_feature 1..723: note = Homo sapiens__Q01196-1__RUNX1(1-241) CDS opt3
  source 1..723: mol_type = other RNA
atgagaatccccgtggatgccagcaccagcagaagattcacccctcctagcaccgctctgagccctggcaagatgtctgaagctctgcctctgggagcacctgatgctggtgcagctctggccggaaaactgagaagcggcgacagatccatggtggaagtgctggctgatcaccccggcgaacttgtgcggacagacagccctaatttcctgtgcagcgtgctgcctacacactggcggtgcaacaagacactgcctatcgccttcaaggtggtggctctgggagatgtgcctgatggcacactggtcacagtgatggccggcaacgacgagaattacagcgccgagctgagaaatgccaccgccgccatgaagaaccaggtggccagattcaacgacctgagattcgtgggcagaagcggcaggggcaagagctttaccctgaccatcaccgtgttcaccaatcctccacaggtggcaacctaccaccgggccatcaagatcaccgtggatggccctagagagcccagacggcacagacagaaactggacgaccagaccaagcctggcagcctgagctttagcgagagactgagcgagctggaacagctgagaagaaccgccatgcgggtgtccccacatcaccctgctcctacacctaatcctcgggccagcctgaatcacagcaccgcctttaatccccagcctcagagccagatgcag

SEQ ID NO: 526 - RNA, 1815 nt, synthetic construct
  misc_feature 1..1815: note = Homo sapiens__Q06455-1__RUNX1T1a CDS opt3
  source 1..1815: mol_type = other RNA
atgatcagcgtgaagcggaacacttggagagccctgtctctggtcatcggcgactgcagaaagaagggcaacttcgagtactgccaggaccggaccgagaagcacagcaccatgcctgatagccccgtggacgtgaaaacccagagcagactgacccctcctaccatgcctcctccacctacaacacagggcgctcctagaaccagcagcttcacccctaccacactgaccaacggcacctctcacagccccacagctcttaatggcgccccttctccacctaacggcttcagcaatggccctagcagcagcagctctagcagcctggctaatcagcagctgcctcctgcttgtggcgctagacagctgagcaagctgaagcggttcctgaccacactgcagcagttcggcaacgacatcagccctgagatcggcgagcgcgtcagaacactggtgctgggactcgtgaatagcaccctgaccatcgaagagttccacagcaagctgcaagaggccaccaactttccgctgcggcctttcgtgatcccattcctgaaggccaacctgcctctgctgcagagagaactgctccactgcgccagactggccaagcagaaccctgctcagtatctggcccagcacgagcaactgctgctggacgcctctacaacaagccctgtggatagcagcgagctgctcctggatgtgaacgagaacggcaagcggagaacccctgaccggaccaaagagaacggcttcgacagagagcctctgcacagcgagcaccccagcaaaagaccctgcacaattagccctggccagcggtacagccccaacaacggactgagctaccagcctaacggcctgcctcatcctacacctccacctccacagcactaccggctggacgatatggctatcgcccaccactaccgggacagctacagacaccctagccaccgggacctgcgggacagaaatagacctatgggcctgcacggcacccggcaagaggaaatgattgaccaccggctgaccgacagagaatgggccgaagagtggaagcacctggaccatctgctgaactgcatcatggacatggtggaaaagacccggcggagcctgaccgtgctgagaagatgtcaagaggccgatagagaggaactgaactactggatcagacggtacagcgacgccgaggacctgaagaaaggcggcggatctagcagctcccacagcagacagcagagccccgtgaatcctgatcctgtggctctggatgcccacagagaatttctgcacagacccgccagcggctacgtgccagaggaaatctggaagaaagccgaagaggccgtgaacgaagtgaagcggcaggccatgaccgaactgcagaaggccgtttctgaggccgagagaaaggcccacgacatgatcaccaccgagcgggccaagatggaaagaacagtggccgaggccaaaagacaggccgccgaagatgctctggccgtgatcaaccagcaagaggacagcagcgagtcctgctggaactgtggcagaaaggccagcgagacatgcagcggctgtaacaccgccagatattgcggcagcttctgccagcacaaggactgggagaagcaccaccacatctgcggccagacactgcaggctcagcagcaaggcgatacaccagccgtgtctagcagcgtgacccctaattctggcgccggatctcccatggatacccctccagctgccacacctagaagcacaacccctggcacaccctccaccatcgagacaacccctagatga

SEQ ID NO: 527 - RNA, 1992 nt, synthetic construct
  misc_feature 1..1992: note = Homo sapiens__A0A0A0MSU1__RUNX1T1a CDS opt3
  source 1..1992: mol_type = other RNA
atgtgtcaccccgacaaggccttcaccagcgacaagctgcagtgcgtgttcaacgagtacaaggccgctgtgtgggtgccacctagacctagaccactgtctagagcccctctgcctgaagccggcggagaaaatctgcacctgaagatcagcagagtgcggaagcggaacctgccttttgtcgtgtggggcgaagaggaagcctctacacctggactggatgccatcagccaccacctgtgctaccccgacagaacccacagagacagaaccgagaagcacagcaccatgcctgacagccccgtggacgtgaaaacccagagcagactgacccctcctaccatgcctcctccacctacaacacagggcgctcctagaaccagcagcttcacccctaccacactgaccaacggcacctctcacagccccacagctcttaatggcgccccttctccacctaacggcttcagcaatggccctagcagcagcagctctagcagcctggctaatcagcagctgcctcctgcttgtggcgctagacagctgagcaagctgaagcggttcctgaccacactgcagcagttcggcaacgacatcagccctgagatcggcgagcgcgtcagaacactggtgctgggactcgtgaatagcaccctgaccatcgaagagttccacagcaagctgcaagaggccaccaactttccgctgcggcctttcgtgatcccattcctgaaggccaacctgcctctgctgcagagagaactgctccactgcgccagactggccaagcagaaccctgctcagtatctggcccagcacgagcaactgctgctggacgcctctacaacaagccctgtggatagcagcgagctgctcctggatgtgaacgagaacggcaagcggagaacccctgaccggaccaaagagaacggcttcgacagagagcctctgcacagcgagcaccccagcaaaagaccctgcacaattagccctggccagcggtacagccccaacaacggactgagctaccagcctaacggcctgcctcatcctacacctccacctccacagcactaccggctggacgatatggctatcgcccaccactaccgggacagctacagacaccctagccaccgggacctgcgggacagaaatagacctatgggcctgcacggcacccggcaagaggaaatgattgaccaccggctgaccgacagagaatgggccgaagagtggaagcacctggaccatctgctgaactgcatcatggacatggtggaaaagacccggcggagcctgaccgtgctgagaagatgtcaagaggccgatagagaggaactgaactactggatcagacggtacagcgacgccgaggacctgaagaaaggcggcggatctagcagctcccactccagacagcagagccccgtgaatcctgatcctgtggctctggacgcccaccgcgaatttctgcatagacctgccagcggctacgtgcccgaggaaatctggaagaaagccgaagaggccgtgaacgaagtgaagcggcaggccatgaccgagctgcagaaagccgtgtctgaggccgagagaaaggcccacgatatgatcacaaccgagcgggccaagatggaaagaacagtggccgaggccaaaagacaggccgccgaagatgctctggccgtgatcaaccagcaagaggacagcagcgagtcctgctggaactgtggcagaaaggccagcgagacatgcagcggctgtaacaccgccagatattgcggcagcttctgccagcacaaggactgggagaagcaccaccacatctgcggccagacactgcaggctcagcagcaaggcgatactcctgccgtgtctagcagcgtgacccctaattctggcgccggatctcccatggatacccctccagctgccacacctagaagcacaacccctggcacaccctccaccatcgagacaacccctagatga

SEQ ID NO: 528 - RNA, 1848 nt, synthetic construct
  misc_feature 1..1848: note = Homo sapiens__Q06455-3__RUNX1T1a CDS opt3
  source 1..1848: mol_type = other RNA
atgtgtcaccccgacaaggccttcaccagcgacaagctgcagtgcgtgttcaacgagtacaaggccgctgtgtgggtgccacctagacctagaccactgtctagagcccctctgcctgaggacagaaccgagaagcacagcaccatgcctgacagccccgtggacgtgaaaacccagagcagactgacccctcctaccatgcctcctccacctacaacacagggcgctcctagaaccagcagcttcacccctaccacactgaccaacggcacctctcacagccccacagctcttaatggcgccccttctccacctaacggcttcagcaatggccctagcagcagcagctctagcagcctggctaatcagcagctgcctcctgcttgtggcgctagacagctgagcaagctgaagcggttcctgaccacactgcagcagttcggcaacgacatcagccctgagatcggcgagcgcgtcagaacactggtgctgggactcgtgaatagcaccctgaccatcgaagagttccacagcaagctgcaagaggccaccaactttccgctgcggcctttcgtgatcccattcctgaaggccaacctgcctctgctgcagagagaactgctccactgcgccagactggccaagcagaaccctgctcagtatctggcccagcacgagcaactgctgctggacgcctctacaacaagccctgtggatagcagcgagctgctcctggatgtgaacgagaacggcaagcggagaacccctgaccggaccaaagagaacggcttcgacagagagcctctgcacagcgagcaccccagcaaaagaccctgcacaattagccctggccagcggtacagccccaacaacggactgagctaccagcctaacggcctgcctcatcctacacctccacctccacagcactaccggctggacgatatggctatcgcccaccactaccgggacagctacagacaccctagccaccgggacctgcgggacagaaatagacctatgggcctgcacggcacccggcaagaggaaatgattgaccaccggctgaccgacagagaatgggccgaagagtggaagcacctggaccatctgctgaactgcatcatggacatggtggaaaagacccggcggagcctgaccgtgctgagaagatgtcaagaggccgatagagaggaactgaactactggatcagacggtacagcgacgccgaggacctgaagaaaggcggcggatctagcagctcccacagcagacagcagagccccgtgaatcctgatcctgtggctctggatgcccacagagaatttctgcacagacccgccagcggctacgtgccagaggaaatctggaagaaagccgaagaggccgtgaacgaagtgaagcggcaggccatgaccgagctgcagaaagccgtgtctgaggccgagagaaaggcccacgatatgatcacaaccgagcgggccaagatggaaagaacagtggccgaggccaaaagacaggccgccgaagatgctctggccgtgatcaaccagcaagaggacagcagcgagtcctgctggaactgtggcagaaaggccagcgagacatgcagcggctgtaacaccgccagatattgcggcagcttctgccagcacaaggactgggagaagcaccaccacatctgcggccagacactgcaggctcagcagcaaggcgatactcctgccgtgtctagcagcgtgacccctaattctggcgccggatctcccatggatacccctccagctgccacacctagaagcacaacccctggcacaccctccaccatcgagacaacccctagatga

SEQ ID NO: 529 - RNA, 1755 nt, synthetic construct
  misc_feature 1..1755: note = Homo sapiens__A0A087WWT6__RUNX1T1a CDS opt3
  source 1..1755: mol_type = other RNA
atggttggactgtctggccccgtgcagtacagaaccgagaagcacagcaccatgcctgacagccccgtggacgtgaaaacccagagcagactgacccctcctaccatgcctcctccacctacaacacagggcgctcctagaaccagcagcttcacccctaccacactgaccaacggcacctctcacagccccacagctcttaatggcgccccttctccacctaacggcttcagcaatggccctagcagcagcagctctagcagcctggctaatcagcagctgcctcctgcttgtggcgctagacagctgagcaagctgaagcggttcctgaccacactgcagcagttcggcaacgacatcagccctgagatcggcgagcgcgtcagaacactggtgctgggactcgtgaatagcaccctgaccatcgaagagttccacagcaagctgcaagaggccaccaactttccgctgcggcctttcgtgatcccattcctgaaggccaacctgcctctgctgcagagagaactgctccactgcgccagactggccaagcagaaccctgctcagtatctggcccagcacgagcaactgctgctggacgcctctacaacaagccctgtggatagcagcgagctgctcctggatgtgaacgagaacggcaagcggagaacccctgaccggaccaaagagaacggcttcgacagagagcctctgcacagcgagcaccccagcaaaagaccctgcacaattagccctggccagcggtacagccccaacaacggactgagctaccagcctaacggcctgcctcatcctacacctccacctccacagcactaccggctggacgatatggctatcgcccaccactaccgggacagctacagacaccctagccaccgggacctgcgggacagaaatagacctatgggcctgcacggcacccggcaagaggaaatgattgaccaccggctgaccgacagagaatgggccgaagagtggaagcacctggaccatctgctgaactgcatcatggacatggtggaaaagacccggcggagcctgaccgtgctgagaagatgtcaagaggccgatagagaggaactgaactactggatcagacggtacagcgacgccgaggacctgaagaaaggcggcggatctagcagctcccacagcagacagcagagccccgtgaatcctgatcctgtggctctggatgcccacagagaatttctgcacagacccgccagcggctacgtgccagaggaaatctggaagaaagccgaagaggccgtgaacgaagtgaagcggcaggccatgaccgagctgcagaaagccgtgtctgaggccgagagaaaggcccacgatatgatcacaaccgagcgggccaagatggaaagaacagtggccgaggccaaaagacaggccgccgaagatgctctggccgtgatcaaccagcaagaggacagcagcgagtcctgctggaactgtggcagaaaggccagcgagacatgcagcggctgtaacaccgccagatattgcggcagcttctgccagcacaaggactgggagaagcaccaccacatctgcggccagacactgcaggctcagcagcaaggcgatactcctgccgtgtctagcagcgtgacccctaattctggcgccggatctcccatggatacccctccagctgccacacctagaagcacaacccctggcacaccctccaccatcgagacaacccctagatga

SEQ ID NO: 530 - RNA, 1734 nt, synthetic construct
  misc_feature 1..1734: note = Homo sapiens__Q06455-2__RUNX1T1a CDS opt3
  source 1..1734: mol_type = other RNA
atgcccgacagaaccgagaagcacagcaccatgcctgacagccccgtggacgtgaaaacccagagcagactgacccctcctaccatgcctcctccacctacaacacagggcgctcctagaaccagcagcttcacccctaccacactgaccaacggcacctctcacagccccacagctcttaatggcgccccttctccacctaacggcttcagcaatggccctagcagcagcagctctagcagcctggctaatcagcagctgcctcctgcttgtggcgctagacagctgagcaagctgaagcggttcctgaccacactgcagcagttcggcaacgacatcagccctgagatcggcgagcgcgtcagaacactggtgctgggactcgtgaatagcaccctgaccatcgaagagttccacagcaagctgcaagaggccaccaactttccgctgcggcctttcgtgatcccattcctgaaggccaacctgcctctgctgcagagagaactgctccactgcgccagactggccaagcagaaccctgctcagtatctggcccagcacgagcaactgctgctggacgcctctacaacaagccctgtggatagcagcgagctgctcctggatgtgaacgagaacggcaagcggagaacccctgaccggaccaaagagaacggcttcgacagagagcctctgcacagcgagcaccccagcaaaagaccctgcacaattagccctggccagcggtacagccccaacaacggactgagctaccagcctaacggcctgcctcatcctacacctccacctccacagcactaccggctggacgatatggctatcgcccaccactaccgggacagctacagacaccctagccaccgggacctgcgggacagaaatagacctatgggcctgcacggcacccggcaagaggaaatgattgaccaccggctgaccgacagagaatgggccgaagagtggaagcacctggaccatctgctgaactgcatcatggacatggtggaaaagacccggcggagcctgaccgtgctgagaagatgtcaagaggccgatagagaggaactgaactactggatcagacggtacagcgacgccgaggacctgaagaaaggcggcggatctagcagctcccacagcagacagcagagccccgtgaatcctgatcctgtggctctggatgcccacagagaatttctgcacagacccgccagcggctacgtgccagaggaaatctggaagaaagccgaagaggccgtgaacgaagtgaagcggcaggccatgaccgagctgcagaaagccgtgtctgaggccgagagaaaggcccacgatatgatcacaaccgagcgggccaagatggaaagaacagtggccgaggccaaaagacaggccgccgaagatgctctggccgtgatcaaccagcaagaggacagcagcgagtcctgctggaactgtggcagaaaggccagcgagacatgcagcggctgtaacaccgccagatattgcggcagcttctgccagcacaaggactgggagaagcaccaccacatctgcggccagacactgcaggctcagcagcaaggcgatactcctgccgtgtctagcagcgtgacccctaattctggcgccggatctcccatggatacccctccagctgccacacctagaagcacaacccctggcacaccctccaccatcgagacaacccctagatga

SEQ ID NO: 531 - RNA, 1704 nt, synthetic construct
  misc_feature 1..1704: note = Homo sapiens__Q06455-4__RUNX1T1a CDS opt3
  source 1..1704: mol_type = other RNA
atgcctgacagccccgtggatgtgaaaacccagagcagactgacccctcctaccatgcctcctccacctacaacacagggcgctcctagaaccagcagcttcacccctaccacactgaccaacggcacctctcacagccccacagctcttaatggcgccccttctccacctaacggcttcagcaatggccctagcagcagcagctctagcagcctggctaatcagcagctgcctcctgcttgtggcgctagacagctgagcaagctgaagcggttcctgaccacactgcagcagttcggcaacgacatcagccctgagatcggcgagcgcgtcagaacactggtgctgggactcgtgaatagcaccctgaccatcgaagagttccacagcaagctgcaagaggccaccaactttccgctgcggcctttcgtgatcccattcctgaaggccaacctgcctctgctgcagagagaactgctccactgcgccagactggccaagcagaaccctgctcagtatctggcccagcacgagcaactgctgctggacgcctctacaacaagccctgtggatagcagcgagctgctcctggacgtgaacgagaacggcaagagaagaacccctgaccggaccaaagagaacggcttcgacagagagcctctgcacagcgagcaccccagcaaaagaccctgcacaattagccctggccagcggtacagccccaacaacggactgagctaccagcctaacggcctgcctcatcctacacctccacctccacagcactaccggctggacgatatggctatcgcccaccactaccgggacagctacagacaccctagccaccgggacctgcgggacagaaatagacctatgggcctgcacggcacccggcaagaggaaatgattgaccaccggctgaccgacagagaatgggccgaagagtggaagcacctggaccatctgctgaactgcatcatggacatggtggaaaagacccggcggagcctgaccgtgctgagaagatgtcaagaggccgatagagaggaactgaactactggatcagacggtacagcgacgccgaggacctgaagaaaggcggcggatctagcagctcccacagcagacagcagagccccgtgaatcctgatcctgtggctctggatgcccacagagaatttctgcacagacccgccagcggctacgtgccagaggaaatctggaagaaagccgaagaggccgtgaacgaagtgaagcggcaggccatgaccgagctgcagaaagccgtgtctgaggccgagagaaaggcccacgatatgatcacaaccgagcgggccaagatggaaagaacagtggccgaggccaaaagacaggccgccgaagatgctctggccgtgatcaaccagcaagaggacagcagcgagtcctgctggaactgtggcagaaaggccagcgagacatgcagcggctgtaacaccgccagatattgcggcagcttctgccagcacaaggactgggagaagcaccaccacatctgcggccagacactgcaggctcagcagcaaggcgatactcctgccgtgtctagcagcgtgacccctaattctggcgccggatctcccatggatacccctccagctgccacacctagaagcacaacacctggcacaccctccaccatcgagacaacccctagatga

SEQ ID NO: 532 - RNA, 1284 nt, synthetic construct
  misc_feature 1..1284: note = Homo sapiens__Q06455-5__RUNX1T1a CDS opt3
  source 1..1284: mol_type = other RNA
atgatcagcgtgaagcggaacacttggagagccctgtctctggtcatcggcgactgcagaaagaagggcaacttcgagtactgccaggaccggaccgagaagcacagcaccatgcctgatagccccgtggacgtgaaaacccagagcagactgacccctcctaccatgcctcctccacctacaacacagggcgctcctagaaccagcagcttcacccctaccacactgaccaacggcacctctcacagccccacagctcttaatggcgccccttctccacctaacggcttcagcaatggccctagcagcagcagctctagcagcctggctaatcagcagctgcctcctgcttgtggcgctagacagctgagcaagctgaagcggttcctgaccacactgcagcagttcggcaacgacatcagccctgagatcggcgagcgcgtcagaacactggtgctgggactcgtgaatagcaccctgaccatcgaagagttccacagcaagctgcaagaggccaccaactttccgctgcggcctttcgtgatcccattcctgaaggccaacctgcctctgctgcagagagaactgctccactgcgccagactggccaagcagaaccctgctcagtatctggcccagcacgagcaactgctgctggacgcctctacaacaagccctgtggatagcagcgagctgctcctggatgtgaacgagaacggcaagcggagaacccctgaccggaccaaagagaacggcttcgacagagagcctctgcacagcgagcaccccagcaaaagaccctgcacaattagccctggccagcggtacagccccaacaacggactgagctaccagcctaacggcctgcctcatcctacacctccacctccacagcactaccggctggacgatatggctatcgcccaccactaccgggacagctacagacaccctagccaccgggacctgcgggacagaaatagacctatgggcctgcacggcacccggcaagaggaaatgattgaccaccggctgaccgacagagaatgggccgaagagtggaagcacctggaccatctgctgaactgcatcatggacatggtggaaaagacccggcggagcctgaccgtgctgagaagatgtcaagaggccgatagagaggaactgaactactggatcagacggtacagcgacgccgaggacctgaagaaaggcggcggatctagcagctcccacagcagacagcagagccccgtgaatcctgatcctgtggctctgggatga

SEQ ID NO: 533 - RNA, 1203 nt, synthetic construct
  misc_feature 1..1203: note = Homo sapiens__Q06455-6__RUNX1T1a CDS opt3
  source 1..1203: mol_type = other RNA
atgcccgacagaaccgagaagcacagcaccatgcctgacagccccgtggacgtgaaaacccagagcagactgacccctcctaccatgcctcctccacctacaacacagggcgctcctagaaccagcagcttcacccctaccacactgaccaacggcacctctcacagccccacagctcttaatggcgccccttctccacctaacggcttcagcaatggccctagcagcagcagctctagcagcctggctaatcagcagctgcctcctgcttgtggcgctagacagctgagcaagctgaagcggttcctgaccacactgcagcagttcggcaacgacatcagccctgagatcggcgagcgcgtcagaacactggtgctgggactcgtgaatagcaccctgaccatcgaagagttccacagcaagctgcaagaggccaccaactttccgctgcggcctttcgtgatcccattcctgaaggccaacctgcctctgctgcagagagaactgctccactgcgccagactggccaagcagaaccctgctcagtatctggcccagcacgagcaactgctgctggacgcctctacaacaagccctgtggatagcagcgagctgctcctggatgtgaacgagaacggcaagcggagaacccctgaccggaccaaagagaacggcttcgacagagagcctctgcacagcgagcaccccagcaaaagaccctgcacaattagccctggccagcggtacagccccaacaacggactgagctaccagcctaacggcctgcctcatcctacacctccacctccacagcactaccggctggacgatatggctatcgcccaccactaccgggacagctacagacaccctagccaccgggacctgcgggacagaaatagacctatgggcctgcacggcacccggcaagaggaaatgattgaccaccggctgaccgacagagaatgggccgaagagtggaagcacctggaccatctgctgaactgcatcatggacatggtggaaaagacccggcggagcctgaccgtgctgagaagatgtcaagaggccgatagagaggaactgaactactggatcagacggtacagcgacgccgaggacctgaagaaaggcggcggatctagcagctcccacagcagacagcagagccccgtgaatcctgatcctgtggctctgggatga

SEQ ID NO: 534 - RNA, 1722 nt, synthetic construct
  misc_feature 1..1722: note = Homo sapiens__Q06455-1__RUNX1T1a(31-604) CDS opt3
  source 1..1722: mol_type = other RNA
cggaccgagaagcacagcaccatgcctgatagccccgtggacgtgaaaacccagagcagactgacccctcctaccatgcctcctccacctacaacacagggcgctcctagaaccagcagcttcacccctaccacactgaccaacggcacctctcacagccccacagctcttaatggcgccccttctccacctaacggcttcagcaatggccctagcagcagcagctctagcagcctggctaatcagcagctgcctcctgcttgtggcgctagacagctgagcaagctgaagcggttcctgaccacactgcagcagttcggcaacgacatcagccctgagatcggcgagcgcgtcagaacactggtgctgggactcgtgaatagcaccctgaccatcgaagagttccacagcaagctgcaagaggccaccaactttccgctgcggcctttcgtgatcccattcctgaaggccaacctgcctctgctgcagagagaactgctccactgcgccagactggccaagcagaaccctgctcagtatctggcccagcacgagcaactgctgctggacgcctctacaacaagccctgtggatagcagcgagctgctcctggatgtgaacgagaacggcaagcggagaacccctgaccggaccaaagagaacggcttcgacagagagcctctgcacagcgagcaccccagcaaaagaccctgcacaattagccctggccagcggtacagccccaacaacggactgagctaccagcctaacggcctgcctcatcctacacctccacctccacagcactaccggctggacgatatggctatcgcccaccactaccgggacagctacagacaccctagccaccgggacctgcgggacagaaatagacctatgggcctgcacggcacccggcaagaggaaatgattgaccaccggctgaccgacagagaatgggccgaagagtggaagcacctggaccatctgctgaactgcatcatggacatggtggaaaagacccggcggagcctgaccgtgctgagaagatgtcaagaggccgatagagaggaactgaactactggatcagacggtacagcgacgccgaggacctgaagaaaggcggcggatctagcagctcccacagcagacagcagagccccgtgaatcctgatcctgtggctctggatgcccacagagaatttctgcacagacccgccagcggctacgtgccagaggaaatctggaagaaagccgaagaggccgtgaacgaagtgaagcggcaggccatgaccgaactgcagaaggccgtttctgaggccgagagaaaggcccacgacatgatcaccaccgagcgggccaagatggaaagaacagtggccgaggccaaaagacaggccgccgaagatgctctggccgtgatcaaccagcaagaggacagcagcgagtcctgctggaactgtggcagaaaggccagcgagacatgcagcggctgtaacaccgccagatattgcggcagcttctgccagcacaaggactgggagaagcaccaccacatctgcggccagacactgcaggctcagcagcaaggcgatacaccagccgtgtctagcagcgtgacccctaattctggcgccggatctcccatggatacccctccagctgccacacctagaagcacaacccctggcacaccctccaccatcgagacaacccctaga

SEQ ID NO: 535 - RNA, 1815 nt, synthetic construct
  misc_feature 1..1815: note = Homo sapiens__O43439-1__RUNX1T1b CDS opt3
  source 1..1815: mol_type = other RNA
atggccaaagagagcggcatcagcctgaaagaaatccaggtgctggcccggcagtggaaagtgggacctgagaaaagggtgccagccatgcctggaagccccgtggaagtgaagatccagagcagatctagccctcctaccatgcctcctctgcctccaatcaatcctggcggccctagacctgtgtccttcacacctaccgctctgagcaacggcatcaatcacagccctccaacactgaatggcgccccatctcctccacagcggttttctaatggccctgccagcagcacaagcagcgccctgacaaatcagcagctgcctgctacatgtggcgccagacagctgagcaagctgaagcggtttctgaccacactgcagcagttcggcaacgacatcagccctgagatcggcgagaaagtgcggacactggtgctggctctggtcaacagcaccgtgaccatcgaagagttccactgcaagctgcaagaggccacaaacttccctctgcggcccttcgtgatcccattcctgaaggccaatctgcccctgctgcagagagagctgctgcattgcgccagagccgccaagcagacaccttctcagtatctggcccagcacgagcatctgctgctgaacacctctatcgcctctccagccgatagcagcgagctgctcatggaagtgcacggcaacggaaagaggccctctccagagcggagagaggaaaacagcttcgaccgggacacaatcgcccctgagcctccagccaagagagtgtgcacaatcagccccgctcctagacacagccctgctctgacagtgcccctgatgaatccaggcggccagtttcaccctacacctccaccactccagcactacaccctggaagatatcgccaccagccacctgtaccgcgagcctaacaagatgctggaacaccgggaagtgcgggacagacaccactctctgggactgaacggcggctaccaggatgagctggtggatcacagactgaccgagcgcgaatgggccgatgagtggaaacacctggatcacgccctgaactgcatcatggaaatggtggaaaagacccggcggagcatggccgtgctgagaagatgtcaagagagcgacagagaggaactgaactactggaagcggcggtacaacgagaacaccgagctgagaaagaccggcacagagctggtgtccagacagcacagtcctggctctgccgatagcctgagcaatgactctcagcgcgagttcaacagcagacccggcacaggctatgtgcccgtggaattttggaagaaaaccgaagaggccgtgaacaaagtcaagattcaggccatgagcgaggtgcagaaagccgtggctgaggccgaacagaaagccttcgaagtgatcgccaccgagcgggccagaatggaacagacaatcgccgacgtgaagagacaggccgccgaggatgccttcctggtcatcaacgagcaagaggaaagcaccgagaactgctggaactgcggcagaaaggccagcgagacatgcagcggctgcaatatcgccagatattgcggcagcttctgccagcacaaggactgggagagacaccatagactgtgcggccagaacctgcacggacagtctccacatggacagggcagacctctgctgcctgttggcagaggaagctctgccagatctgccgattgcagcgtgccatctcctgcactggataagaccagcgccaccacctccagaagcagcactcctgcatctgtgaccgccatcgacaccaacggactgtga

SEQ ID NO: 536 - RNA, 1845 nt, synthetic construct
  misc_feature 1..1845: note = Homo sapiens__O43439-4__RUNX1T1b CDS opt3
  source 1..1845: mol_type = other RNA
atgggctttcaccacgttggacaggccagactggaactgctgacaagcggagatctgcctgctctggcctctcagcgagccggaattacagtgggacctgagaagagggtgccagccatgcctggatctcccgtggaagtgaagatccagagccggtctagccctcctaccatgcctcctctgcctccaatcaatcctggcggccctagacctgtgtccttcacacctaccgctctgagcaacggcatcaatcacagccctccaacactgaatggcgccccatctcctccacagcggttttctaatggccctgccagcagcacaagcagcgccctgacaaatcagcagctgcctgctacatgtggcgccagacagctgagcaagctgaagcggtttctgaccacactgcagcagttcggcaacgacatcagccctgagatcggcgagaaagtgcggacactggtgctggccctggtcaatagcaccgtgaccatcgaagagttccactgcaagctgcaagaggccaccaactttccgctgcggcctttcgtgatcccattcctgaaggccaacctgcctctgctgcagagagagctgctgcattgcgccagagccgccaagcagacaccttctcagtatctggcccagcacgagcatctgctgctgaacacctctatcgcctctccagccgatagcagcgagctgctcatggaagtgcacggcaacggaaagaggccctctccagagcggagagaggaaaacagcttcgaccgggacacaatcgcccctgagcctccagccaagagagtgtgcacaatcagccccgctcctagacacagccctgctctgacagtgcccctgatgaatccaggcggccagtttcaccctacacctccaccactccagcactacaccctggaagatatcgccaccagccacctgtaccgcgagcctaacaagatgctggaacaccgggaagtgcgggacagacaccactctctgggactgaacggcggctaccaggatgagctggtggatcacagactgaccgagcgcgaatgggccgatgagtggaaacacctggatcacgccctgaactgcatcatggaaatggtggaaaagacccggcggagcatggccgtgctgagaagatgtcaagagagcgacagagaggaactgaactactggaagcggcggtacaacgagaacaccgagctgagaaagaccggcacagagctggtgtccagacagcacagtcctggctctgccgatagcctgagcaatgactctcagcgcgagttcaacagcagacccggcacaggctatgtgcccgtggaattttggaagaaaaccgaagaggccgtgaacaaagtcaagattcaggccatgagcgaggtgcagaaagccgtggctgaggccgaacagaaagccttcgaagtgatcgccaccgagcgggctagaatggaacagacaatcgccgacgtgaagagacaggccgccgaggatgccttcctggtcatcaacgagcaagaggaaagcaccgagaactgctggaattgcggccggaaggccagcgagacatgcagcggatgtaatatcgcccggtactgcggcagcttctgccagcacaaggattgggagagacaccatagactgtgcggccagaacctgcacggacagtctccacatggacaaggcagaccactgctgcctgttggcagaggaagctctgccagatctgccgattgcagcgtgccatctcctgcactggataagaccagcgccaccacctccagaagcagcactcctgcatctgtgaccgccatcgacaccaacggactgtga

SEQ ID NO: 537 - RNA, 1788 nt, synthetic construct
  misc_feature 1..1788: note = Homo sapiens__O43439-5__RUNX1T1b CDS opt3
  source 1..1788: mol_type = other RNA
atggttggagttcctggcgccgctgcttttcagctgggacctgagaaaagggtgccagccatgcctggaagccccgtggaagtgaagatccagagcagatctagccctcctaccatgcctcctctgcctccaatcaatcctggcggccctagacctgtgtccttcacacctaccgctctgagcaacggcatcaatcacagccctccaacactgaatggcgccccatctcctccacagcggttttctaatggccctgccagcagcacaagcagcgccctgacaaatcagcagctgcctgctacatgtggcgccagacagctgagcaagctgaagcggtttctgaccacactgcagcagttcggcaacgacatcagccctgagatcggcgagaaagtgcggacactggtgctggccctggtcaatagcaccgtgaccatcgaagagttccactgcaagctgcaagaggccaccaactttccgctgcggcctttcgtgatcccattcctgaaggccaacctgcctctgctgcagagagagctgctgcattgcgccagagccgccaagcagacaccttctcagtatctggcccagcacgagcatctgctgctgaacacctctatcgcctctccagccgatagcagcgagctgctcatggaagtgcacggcaacggaaagaggccctctccagagcggagagaggaaaacagcttcgaccgggacacaatcgcccctgagcctccagccaagagagtgtgcacaatcagccccgctcctagacacagccctgctctgacagtgcccctgatgaatccaggcggccagtttcaccctacacctccaccactccagcactacaccctggaagatatcgccaccagccacctgtaccgcgagcctaacaagatgctggaacaccgggaagtgcgggacagacaccactctctgggactgaacggcggctaccaggatgagctggtggatcacagactgaccgagcgcgaatgggccgatgagtggaaacacctggatcacgccctgaactgcatcatggaaatggtggaaaagacccggcggagcatggccgtgctgagaagatgtcaagagagcgacagagaggaactgaactactggaagcggcggtacaacgagaacaccgagctgagaaagaccggcacagagctggtgtccagacagcacagtcctggctctgccgatagcctgagcaatgactctcagcgcgagttcaacagcagacccggcacaggctatgtgcccgtggaattttggaagaaaaccgaagaggccgtgaacaaagtcaagattcaggccatgagcgaggtgcagaaagccgtggctgaggccgaacagaaagccttcgaagtgatcgccaccgagcgggccagaatggaacagacaatcgccgacgtgaagagacaggccgccgaggatgccttcctggtcatcaacgagcaagaggaaagcaccgagaactgctggaactgcggcagaaaggccagcgagacatgcagcggctgcaatatcgccagatattgcggcagcttctgccagcacaaggactgggagagacaccatagactgtgcggccagaacctgcacggacagtctccacatggacagggcagaccactgctgcctgttggcagaggaagctctgccagatctgccgattgcagcgtgccatctcctgcactggataagaccagcgccaccacctccagaagcagcactcctgcatctgtgaccgccatcgacaccaacggactgtga

SEQ ID NO: 538 - RNA, 1728 nt, synthetic construct
  misc_feature 1..1728: note = Homo sapiens__O43439-2__RUNX1T1b CDS opt3
  source 1..1728: mol_type = other RNA
atgcctggctctcccgtggaagtgaagatccagagcagatctagccctcctaccatgcctcctctgcctccaatcaatcctggcggccctagacctgtgtccttcacacctaccgctctgagcaacggcatcaatcacagccctccaacactgaatggcgccccatctcctccacagcggttttctaatggccctgccagcagcacaagcagcgccctgacaaatcagcagctgcctgctacatgtggcgccagacagctgagcaagctgaagcggtttctgaccacactgcagcagttcggcaacgacatcagccctgagatcggcgagaaagtgcggacactggtgctggccctggtcaatagcaccgtgaccatcgaagagttccactgcaagctgcaagaggccaccaactttccgctgcggcctttcgtgatcccattcctgaaggccaacctgcctctgctgcagagagagctgctgcattgcgccagagccgccaagcagacaccttctcagtatctggcccagcacgagcatctgctgctgaacacctctatcgcctctccagccgatagcagcgagctgctcatggaagtgcacggcaacggaaagaggccctctccagagcggagagaggaaaacagcttcgaccgggacacaatcgcccctgagcctccagccaagagagtgtgcacaatcagccccgctcctagacacagccctgctctgacagtgcccctgatgaatccaggcggccagtttcaccctacacctccaccactccagcactacaccctggaagatatcgccaccagccacctgtaccgcgagcctaacaagatgctggaacaccgggaagtgcgggacagacaccactctctgggactgaacggcggctaccaggatgagctggtggatcacagactgaccgagcgcgaatgggccgatgagtggaaacacctggatcacgccctgaactgcatcatggaaatggtggaaaagacccggcggagcatggccgtgctgagaagatgtcaagagagcgacagagaggaactgaactactggaagcggcggtacaacgagaacaccgagctgagaaagaccggcacagagctggtgtccagacagcacagtcctggctctgccgatagcctgagcaatgactctcagcgcgagttcaacagcagacccggcacaggctatgtgcccgtggaattttggaagaaaaccgaagaggccgtgaacaaagtcaagattcaggccatgagcgaggtgcagaaagccgtggctgaggccgaacagaaagccttcgaagtgatcgccaccgagcgggccagaatggaacagacaatcgccgacgtgaagagacaggccgccgaggatgccttcctggtcatcaacgagcaagaggaaagcaccgagaactgctggaactgcggcagaaaggccagcgagacatgcagcggctgcaatatcgccagatattgcggcagcttctgccagcacaaggactgggagagacaccatagactgtgcggccagaacctgcacggacagtctccacatggacagggcagaccactgctgcctgttggcagaggaagctctgccagatctgccgattgcagcgtgccatctcctgcactggataagaccagcgccaccacctccagaagcagcactcctgcatctgtgaccgccatcgacaccaacggactgtga

SEQ ID NO: 539 - RNA, 48 nt, synthetic construct
  misc_feature 1..48: note = Homo sapiens____RUNX1T1b(short) CDS opt3
  source 1..48: mol_type = other RNA
gaagtgggcttttgtcacgtggcccaagtgggcctgaaactgcttgga

SEQ ID NO: 540 - RNA, 1749 nt, synthetic construct
  misc_feature 1..1749: note = Homo sapiens__O43439-1__RUNX1T1b(22-604) CDS opt3
  source 1..1749: mol_type = other RNA
ggacctgagaaaagggtgccagccatgcctggaagccccgtggaagtgaagatccagagcagatctagccctcctaccatgcctcctctgcctccaatcaatcctggcggccctagacctgtgtccttcacacctaccgctctgagcaacggcatcaatcacagccctccaacactgaatggcgccccatctcctccacagcggttttctaatggccctgccagcagcacaagcagcgccctgacaaatcagcagctgcctgctacatgtggcgccagacagctgagcaagctgaagcggtttctgaccacactgcagcagttcggcaacgacatcagccctgagatcggcgagaaagtgcggacactggtgctggctctggtcaacagcaccgtgaccatcgaagagttccactgcaagctgcaagaggccacaaacttccctctgcggcccttcgtgatcccattcctgaaggccaatctgcccctgctgcagagagagctgctgcattgcgccagagccgccaagcagacaccttctcagtatctggcccagcacgagcatctgctgctgaacacctctatcgcctctccagccgatagcagcgagctgctcatggaagtgcacggcaacggaaagaggccctctccagagcggagagaggaaaacagcttcgaccgggacacaatcgcccctgagcctccagccaagagagtgtgcacaatcagccccgctcctagacacagccctgctctgacagtgcccctgatgaatccaggcggccagtttcaccctacacctccaccactccagcactacaccctggaagatatcgccaccagccacctgtaccgcgagcctaacaagatgctggaacaccgggaagtgcgggacagacaccactctctgggactgaacggcggctaccaggatgagctggtggatcacagactgaccgagcgcgaatgggccgatgagtggaaacacctggatcacgccctgaactgcatcatggaaatggtggaaaagacccggcggagcatggccgtgctgagaagatgtcaagagagcgacagagaggaactgaactactggaagcggcggtacaacgagaacaccgagctgagaaagaccggcacagagctggtgtccagacagcacagtcctggctctgccgatagcctgagcaatgactctcagcgcgagttcaacagcagacccggcacaggctatgtgcccgtggaattttggaagaaaaccgaagaggccgtgaacaaagtcaagattcaggccatgagcgaggtgcagaaagccgtggctgaggccgaacagaaagccttcgaagtgatcgccaccgagcgggccagaatggaacagacaatcgccgacgtgaagagacaggccgccgaggatgccttcctggtcatcaacgagcaagaggaaagcaccgagaactgctggaactgcggcagaaaggccagcgagacatgcagcggctgcaatatcgccagatattgcggcagcttctgccagcacaaggactgggagagacaccatagactgtgcggccagaacctgcacggacagtctccacatggacagggcagacctctgctgcctgttggcagaggaagctctgccagatctgccgattgcagcgtgccatctcctgcactggataagaccagcgccaccacctccagaagcagcactcctgcatctgtgaccgccatcgacaccaacggactg

SEQ ID NO: 541 - RNA, 1836 nt, synthetic construct
  misc_feature 1..1836: note = Homo sapiens____CBFbeta(1-165)_SMMHC(1527-1972) CDS opt3
  source 1..1836: mol_type = other RNA
atgcctagagtggtgcccgaccagagaagcaagttcgagaacgaagagttctttcggaagctgagcagagagtgcgagatcaagtacaccggcttccgggacagaccccacgaagaaagacaggccagattccagaacgcctgcagagatggcagatccgagatcgcctttgtggccaccggcaccaatctgagcctgcagttctttccagcctcctggcagggcgagcagagacaaacacccagcagagaatacgtggacctggaacgcgaggccggcaaggtgtacctgaaggcccctatgatcctgaacggcgtgtgcgtgatctggaaaggctggatcgatctgcagcggctggatggcatgggctgcctggaatttgacgaggaaagagcccagcaagaggacgcccttgctcagcaggcctttgaggaagccagaaggcggaccagagagttcgaggacagagacagatcccaccgggaagagatggaagtgcacgagctggaaaagagcaagagagccctggaaacccagatggaagaaatgaagacccagctcgaggaactcgaggacgagctgcaggccacagaggatgccaagctgagactggaagtgaacatgcaggccctgaagggccagttcgagagagatctgcaggctagggacgagcagaacgaggaaaagcggagacagctgcagaggcagctgcacgagtacgagacagagctggaagatgagcggaagcagagagcactggccgctgccgccaagaagaaactggaaggcgacctgaaggatctggaactccaggccgacagcgccatcaagggaagagaagaggccatcaagcagctgcggaagctgcaagcccagatgaaggacttccagcgcgagttggaagatgccagagccagcagggatgagatcttcgccaccgccaaagagaacgagaagaaggccaagagcctggaagccgatctgatgcagctccaagaggatctggctgccgccgagagagccagaaaacaggccgacctggaaaaagaggaactggccgaagaactggccagcagcctgtctggcagaaacgctctgcaggacgagaagagaaggctggaagccaggatcgcccagttggaggaagaactcgaagaggaacagggcaacatggaagccatgagcgacagagtgcggaaggccacacagcaggctgagcagctgagcaatgagctggccaccgagagaagcacagcccagaagaatgagagcgccaggcagcagctcgagcggcagaacaaagagctgagaagcaaactgcacgaaatggaaggggccgtgaagtccaagttcaagagcacaatcgccgctctcgaggccaagatcgctcagctcgaagaacaggtggaacaagaggcccgggaaaagcaggccgccacaaagtctctgaagcagaaggacaagaagctgaaagaaatcctgctgcaggtcgaggatgagagaaagatggccgagcagtacaaagaacaggctgagaagggcaacgccagagtgaagcagctgaaacggcaactggaagaggccgaggaagagtcccagagaatcaacgccaacagacggaaactgcagagagagctggacgaagccaccgagtccaatgaggccatgggcagagaagtgaacgccctgaagtctaagctgcggagaggcaacgaaaccagcttcgtgcccagcagaagatccggcggcagaagagtgatcgagaacgccgatggctctgaggaagaaaccgacaccagagatgccgacttcaacggcacaaaggccagcgagtaa

SEQ ID NO: 542 - RNA, 1551 nt, synthetic construct
  misc_feature 1..1551: note = Artificial____CBFbeta(1-165)_SMMHC(1527-1877) CDS opt3
  source 1..1551: mol_type = other RNA
atgcctagagtggtgcccgaccagagaagcaagttcgagaacgaagagttctttcggaagctgagcagagagtgcgagatcaagtacaccggcttccgggacagaccccacgaagaaagacaggccagattccagaacgcctgcagagatggcagatccgagatcgcctttgtggccaccggcaccaatctgagcctgcagttctttccagcctcctggcagggcgagcagagacaaacacccagcagagaatacgtggacctggaacgcgaggccggcaaggtgtacctgaaggcccctatgatcctgaacggcgtgtgcgtgatctggaaaggctggatcgatctgcagcggctggatggcatgggctgcctggaatttgacgaggaaagagcccagcaagaggacgcccttgctcagcaggcctttgaggaagccagaaggcggaccagagagttcgaggacagagacagatcccaccgggaagagatggaagtgcacgagctggaaaagagcaagagagccctggaaacccagatggaagaaatgaagacccagctcgaggaactcgaggacgagctgcaggccacagaggatgccaagctgagactggaagtgaacatgcaggccctgaagggccagttcgagagagatctgcaggctagggacgagcagaacgaggaaaagcggagacagctgcagaggcagctgcacgagtacgagacagagctggaagatgagcggaagcagagagcactggccgctgccgccaagaagaaactggaaggcgacctgaaggatctggaactccaggccgacagcgccatcaagggaagagaagaggccatcaagcagctgcggaagctgcaagcccagatgaaggacttccagcgcgagttggaagatgccagagccagcagggatgagatcttcgccaccgccaaagagaacgagaagaaggccaagagcctggaagccgatctgatgcagctccaagaggatctggctgccgccgagagagccagaaaacaggccgacctggaaaaagaggaactggccgaagaactggccagcagcctgtctggcagaaacgctctgcaggacgagaagagaaggctggaagccaggatcgcccagttggaggaagaactcgaagaggaacagggcaacatggaagccatgagcgacagagtgcggaaggccacacagcaggctgagcagctgagcaatgagctggccaccgagagaagcacagcccagaagaatgagagcgccaggcagcagctcgagcggcagaacaaagagctgagaagcaaactgcacgaaatggaaggggccgtgaagtccaagttcaagagcacaatcgccgctctcgaggccaagatcgctcagctcgaagaacaggtggaacaagaggcccgggaaaagcaggccgccacaaagtctctgaagcagaaggacaagaagctgaaagaaatcctgctgcaggtcgaggatgagagaaagatggccgagcagtacaaagaacaggctgagaagggcaacgcctga

SEQ ID NO: 543 - RNA, 612 nt, synthetic construct
  misc_feature 1..612: note = Artificial____CBFbeta(1-165)_Linker_Lifeact CDS opt3
  source 1..612: mol_type = other RNA
atgcctagagtggtgcccgaccagagaagcaagttcgagaacgaagagttctttcggaagctgagcagagagtgcgagatcaagtacaccggcttccgggacagaccccacgaagaaagacaggccagattccagaacgcctgcagagatggcagatccgagatcgcctttgtggccaccggcaccaatctgagcctgcagttctttccagcctcctggcagggcgagcagagacaaacacccagcagagaatacgtggacctggaacgcgaggccggcaaggtgtacctgaaggcccctatgatcctgaacggcgtgtgcgtgatctggaaaggctggatcgatctgcagcggctggatggcatgggctgcctggaatttgacgaggaaagagcccagcaagaggacgcccttgctcagcaggcctttgaggaagccagaaggcggaccagagagttcgaggacagagacagatcccaccgggaagagatggaaggcggatctggtggaagcggaggtagcggaggatcaggcggaggcggagttgccgatctgatcaagaagttcgagtccatcagcaaagaagagggcgaccctccagtggccacatga

SEQ ID NO: 544 - RNA, 579 nt, synthetic construct
  misc_feature 1..579: note = Artificial____CBFbeta(1-165)_HIF1alpha(549-575) CDS opt3
  source 1..579: mol_type = other RNA
atgcctagagtggtgcccgaccagagaagcaagttcgagaacgaagagttctttcggaagctgagcagagagtgcgagatcaagtacaccggcttccgggacagaccccacgaagaaagacaggccagattccagaacgcctgcagagatggcagatccgagatcgcctttgtggccaccggcaccaatctgagcctgcagttctttccagcctcctggcagggcgagcagagacaaacacccagcagagaatacgtggacctggaacgcgaggccggcaaggtgtacctgaaggcccctatgatcctgaacggcgtgtgcgtgatctggaaaggctggatcgatctgcagcggctggatggcatgggctgcctggaatttgacgaggaaagagcccagcaagaggacgcccttgctcagcaggcctttgaggaagccagaaggcggaccagagagttcgaggacagagacagatcccaccgggaagagatggaacccttcagcacccaagacaccgacctggacctcgaaatgctggccccttacatccccatggacgacgacttccagctgcggtaa

SEQ ID NO: 545 - RNA, 624 nt, synthetic construct
  misc_feature 1..624: note Artificial____CBFbeta(1-165)_Linker_HIF1alpha(549-575) CDS opt3
  source 1..624: mol_type = other RNA
atgcctagagtggtgcccgaccagagaagcaagttcgagaacgaagagttctttcggaagctgagcagagagtgcgagatcaagtacaccggcttccgggacagaccccacgaagaaagacaggccagattccagaacgcctgcagagatggcagatccgagatcgcctttgtggccaccggcaccaatctgagcctgcagttctttccagcctcctggcagggcgagcagagacaaacacccagcagagaatacgtggacctggaacgcgaggccggcaaggtgtacctgaaggcccctatgatcctgaacggcgtgtgcgtgatctggaaaggctggatcgatctgcagcggctggatggcatgggctgcctggaatttgacgaggaaagagcccagcaagaggacgcccttgctcagcaggcctttgaggaagccagaaggcggaccagagagttcgaggacagagacagatcccaccgggaagagatggaaggcggatctggtggaagcggaggtagcggaggatctggcggaggacctttcagcacccaagacaccgacctggacctcgaaatgctggccccttacatccccatggacgacgacttccagctgcggtaa

SEQ ID NO: 546 - RNA, 2259 nt, synthetic construct
  misc_feature 1..2259: note = Artificial____RUNX1(1-177)_N_RUNX1T1a(31-604) CDS opt3
  source 1..2259: mol_type = other RNA
atgagaatccccgtggatgccagcaccagcagaagattcacccctcctagcaccgctctgagccctggcaagatgtctgaagctctgcctctgggagcacctgatgctggtgcagctctggccggaaaactgagaagcggcgacagatccatggtggaagtgctggctgatcaccccggcgaacttgtgcggacagacagccctaatttcctgtgcagcgtgctgcctacacactggcggtgcaacaagacactgcctatcgccttcaaggtggtggctctgggagatgtgcctgatggcacactggtcacagtgatggccggcaacgacgagaattacagcgccgagctgagaaatgccaccgccgccatgaagaaccaggtggccagattcaacgacctgagattcgtgggcagaagcggcaggggcaagagctttaccctgaccatcaccgtgttcaccaatcctccacaggtggcaacctaccaccgggccatcaagatcaccgtggatggccctagagagccccggaacagaacagagaagcacagcaccatgcctgacagccccgtggacgtgaaaacccagagcagactgacccctccaaccatgcctcctccacctacaacacagggcgctcctagaaccagcagcttcacccctaccacactgaccaacggcacctctcacagccccacagctcttaatggcgccccttctccacctaacggcttcagcaatggcccaagcagcagcagctctagcagcctggctaatcagcagctgcctcctgcttgtggcgctagacagctgagcaagctgaagcggttcctgaccacactgcagcagttcggcaacgatatcagccccgagatcggcgagcgcgtcagaacactggttctgggcctcgtgaatagcaccctgacaatcgaagagttccacagcaagctgcaagaggccaccaactttccgctgcggcctttcgtgatcccattcctgaaggccaacctgcctctgctgcagagagaactgctccactgcgccagactggccaagcagaaccctgctcagtatctggcccagcacgagcaactgctgctggacgcctctacaacaagccctgtggatagcagcgagctgctcctggatgtgaacgagaacggcaagcggagaacccctgaccggaccaaagagaacggcttcgacagagagcctctgcacagcgagcaccccagcaaaagaccctgcacaatcagccctggccagcggtactctcccaacaacggcctgagctaccagcctaacggactgccccatcctacacctccacctccacagcactaccggctggacgatatggctatcgcccaccactaccgggacagctacagacaccctagccaccgggacctgcgggacagaaatagacctatgggcctgcacggcacccggcaagaggaaatgattgaccaccggctgaccgacagagaatgggccgaagagtggaagcacctggaccatctgctgaactgcatcatggatatggtggaaaagacccggcggagcctgaccgtgctgagaagatgtcaagaggccgatagagaggaactgaactactggatccggcggtacagcgacgccgaggatcttaagaaaggcggcggatctagcagcagccacagcagacagcagagccccgtgaatcctgatcctgtggcactggatgcccacagagaatttctgcacagacccgccagcggctacgtgccagaggaaatctggaagaaagccgaagaggccgtgaacgaagtgaagagacaggccatgaccgaactgcagaaagccgtgtctgaggccgagagaaaggcccacgatatgatcacaaccgagcgggccaagatggaaagaacagtggccgaggccaaaagacaggccgccgaagatgctctggctgtgatcaatcagcaagaggacagcagcgagtcctgctggaactgtggcagaaaggccagcgagacatgcagcggctgtaacaccgccagatattgcggcagcttctgccagcacaaggactgggagaagcaccaccacatctgcggccagacactgcaggctcagcagcaaggcgatactcctgccgtgtctagcagcgtgacccctaattctggcgccggatctcccatggatacccctccagctgccacacctagaagcacaacccctggcacacccagcaccatcgagacaacccctagatga

SEQ ID NO: 547 - RNA, 774 nt, synthetic construct
  misc_feature 1..774: note = Artificial____RUNX1(1-241)_RUNX1T1b(short) CDS opt3
  source 1..774: mol_type = other RNA
atgagaatccccgtggatgccagcaccagcagaagattcacccctcctagcaccgctctgagccctggcaagatgtctgaagctctgcctctgggagcacctgatgctggtgcagctctggccggaaaactgagaagcggcgacagatccatggtggaagtgctggctgatcaccccggcgaacttgtgcggacagacagccctaatttcctgtgcagcgtgctgcctacacactggcggtgcaacaagacactgcctatcgccttcaaggtggtggctctgggagatgtgcctgatggcacactggtcacagtgatggccggcaacgacgagaattacagcgccgagctgagaaatgccaccgccgccatgaagaaccaggtggccagattcaacgacctgagattcgtgggcagaagcggcaggggcaagagctttaccctgaccatcaccgtgttcaccaatcctccacaggtggcaacctaccaccgggccatcaagatcaccgtggatggccctagagagcccagacggcacagacagaaactggacgaccagaccaagcctggcagcctgagctttagcgagagactgagcgagctggaacagctgagaagaaccgccatgcgggtgtccccacatcaccctgctcctacacctaatcctcgggccagcctgaatcacagcaccgcctttaatccccagcctcagagccagatgcaagaagtgggcttctgtcacgtggcccaagtgggactgaagctgctgggataa

SEQ ID NO: 548 - RNA, 2478 nt, synthetic construct
  misc_feature 1..2478: note = Artificial____RUNX1(1-241)_V_RUNX1T1b(22-604) CDS opt3
  source 1..2478: mol_type = other RNA
atgagaatccccgtggatgccagcaccagcagaagattcacccctcctagcaccgctctgagccctggcaagatgtctgaagctctgcctctgggagcacctgatgctggtgcagctctggccggaaaactgagaagcggcgacagatccatggtggaagtgctggctgatcaccccggcgaacttgtgcggacagacagccctaatttcctgtgcagcgtgctgcctacacactggcggtgcaacaagacactgcctatcgccttcaaggtggtggctctgggagatgtgcctgatggcacactggtcacagtgatggccggcaacgacgagaattacagcgccgagctgagaaatgccaccgccgccatgaagaaccaggtggccagattcaacgacctgagattcgtgggcagaagcggcaggggcaagagctttaccctgaccatcaccgtgttcaccaatcctccacaggtggcaacctaccaccgggccatcaagatcaccgtggatggccctagagagcccagacggcacagacagaaactggacgaccagaccaagcctggcagcctgagctttagcgagagactgagcgagctggaacagctgagaagaaccgccatgcgggtgtccccacatcaccctgctcctacacctaatcctcgggccagcctgaatcacagcaccgcctttaatccccagcctcagagccagatgcaagtgggccctgagaaaagggtgccagccatgcctggaagccccgtggaagtgaagatccagagcagatctagccctcctaccatgcctcctctgcctccaatcaatcctggcggccctagacctgtgtccttcacacctaccgctctgtccaacggcatcaatcacagccctccaacactgaatggcgccccatctccacctcagcggttttctaatggccctgccagcagcacaagcagcgccctgacaaatcagcagctgcctgctacatgtggcgccagacagctgagcaagctgaagcggtttctgaccacactgcagcagttcggcaacgatatcagccccgagatcggcgagaaagtgcggacactggttctggccctggtcaacagcaccgtgaccatcgaagagttccactgcaagctgcaagaggccaccaactttccgctgcggcctttcgtgatcccattcctgaaggccaacctgcctctgctgcagagagagctgctgcattgcgccagagccgccaagcagacaccttctcagtatctggcccagcacgagcatctgctgctgaacacctctatcgcctctccagccgatagcagcgagctgctcatggaagtgcacggcaacggaaagaggccctctccagagcggagagaggaaaacagcttcgaccgggacacaatcgcccctgagcctccagccaagagagtgtgcacaatcagcccagctcctagacacagccccgctctgacagtgccccttatgaaccctggcggacagtttcaccccacacctccaccactccagcactacaccctggaagatatcgccaccagccacctgtaccgcgagcctaacaagatgctggaacaccgggaagtgcgcgacaggcaccattctctgggactgaacggcggctaccaggacgaactggtggatcacagactgaccgagcgcgagtgggccgatgaatggaaacacctggatcacgccctgaactgcatcatggaaatggtggaaaagacccggcggagcatggccgtcctgagaagatgtcaagagagcgacagagaggaactgaactactggaagcggaggtacaacgagaacaccgagctgcggaaaaccggcactgagctggtgtccagacagcactctcctggctctgccgatagcctgagcaacgactcccagagagagttcaacagcagacccggcacaggctacgtgcccgtggaattttggaagaaaaccgaagaggccgtgaacaaagtcaagattcaggccatgagcgaggtgcagaaagccgtggctgaggccgaacagaaagccttcgaagtgatcgccaccgagcgggccagaatggaacagacaatcgccgacgtgaagagacaggccgccgaggatgccttcctggtcatcaacgagcaagaggaaagcaccgagaactgctggaactgcggcagaaaggccagcgagacatgcagcggctgcaatatcgccagatattgcggcagcttctgccagcacaaggactgggagagacaccacagactgtgcggccagaatctgcacggacagagccctcatggacagggcagacctctgctccctgttggcagaggatctagcgccagatctgccgactgtagcgtgccatctcctgcactggataagaccagcgccaccacaagcagaagcagcacaccagcctctgtgaccgccatcgataccaacggactgtga

SEQ ID NO: 549 - RNA, 2478 nt, synthetic construct
  misc_feature 1..2478: note = Artificial____RUNX1(1-241)_I_RUNX1T1b(22-604) CDS opt3
  source 1..2478: mol_type = other RNA
atgagaatccccgtggatgccagcaccagcagaagattcacccctcctagcaccgctctgagccctggcaagatgtctgaagctctgcctctgggagcacctgatgctggtgcagctctggccggaaaactgagaagcggcgacagatccatggtggaagtgctggctgatcaccccggcgaacttgtgcggacagacagccctaatttcctgtgcagcgtgctgcctacacactggcggtgcaacaagacactgcctatcgccttcaaggtggtggctctgggagatgtgcctgatggcacactggtcacagtgatggccggcaacgacgagaattacagcgccgagctgagaaatgccaccgccgccatgaagaaccaggtggccagattcaacgacctgagattcgtgggcagaagcggcaggggcaagagctttaccctgaccatcaccgtgttcaccaatcctccacaggtggcaacctaccaccgggccatcaagatcaccgtggatggccctagagagcccagacggcacagacagaaactggacgaccagaccaagcctggcagcctgagctttagcgagagactgagcgagctggaacagctgagaagaaccgccatgcgggtgtccccacatcaccctgctcctacacctaatcctcgggccagcctgaatcacagcaccgcctttaatccccagcctcagagccagatgcagatcggccctgagaaaagggtgccagccatgcctggaagccccgtggaagtgaagatccagagcagatctagccctcctaccatgcctcctctgcctccaatcaatcctggcggccctagacctgtgtccttcacacctaccgctctgtccaacggcatcaatcacagccctccaacactgaatggcgccccatctccacctcagcggttttctaatggccctgccagcagcacaagcagcgccctgacaaatcagcagctgcctgctacatgtggcgccagacagctgagcaagctgaagcggtttctgaccacactgcagcagttcggcaacgatatcagccccgagatcggcgagaaagtgcggacactggttctggccctggtcaacagcaccgtgaccatcgaagagttccactgcaagctgcaagaggccaccaactttccgctgcggcctttcgtgatcccattcctgaaggccaacctgcctctgctgcagagagagctgctgcattgcgccagagccgccaagcagacaccttctcagtatctggcccagcacgagcatctgctgctgaacacctctatcgcctctccagccgatagcagcgagctgctcatggaagtgcacggcaacggaaagaggccctctccagagcggagagaggaaaacagcttcgaccgggacacaatcgcccctgagcctccagccaagagagtgtgcacaatcagcccagctcctagacacagccccgctctgacagtgccccttatgaaccctggcggacagtttcaccccacacctccaccactccagcactacaccctggaagatatcgccaccagccacctgtaccgcgagcctaacaagatgctggaacaccgggaagtgcgcgacaggcaccattctctgggactgaacggcggctaccaggacgaactggtggatcacagactgaccgagcgcgagtgggccgatgaatggaaacacctggatcacgccctgaactgcatcatggaaatggtggaaaagacccggcggagcatggccgtcctgagaagatgtcaagagagcgacagagaggaactgaactactggaagcggaggtacaacgagaacaccgagctgcggaaaaccggcactgagctggtgtccagacagcactctcctggctctgccgatagcctgagcaacgactcccagagagagttcaacagcagacccggcacaggctacgtgcccgtggaattttggaagaaaaccgaagaggccgtgaacaaagtcaagattcaggccatgagcgaggtgcagaaagccgtggctgaggccgaacagaaagccttcgaagtgatcgccaccgagcgggccagaatggaacagacaatcgccgacgtgaagagacaggccgccgaggatgccttcctggtcatcaacgagcaagaggaaagcaccgagaactgctggaactgcggcagaaaggccagcgagacatgcagcggctgcaatatcgccagatattgcggcagcttctgccagcacaaggactgggagagacaccacagactgtgcggccagaatctgcacggacagagccctcatggacagggcagacctctgctccctgttggcagaggatctagcgccagatctgccgactgtagcgtgccatctcctgcactggataagaccagcgccaccacaagcagaagcagcacaccagcctctgtgaccgccatcgataccaacggactgtga

SEQ ID NO: 550 - RNA, 549 nt, synthetic construct
  misc_feature 1..549: note = Homo sapiens__Q13951-1__CBFbeta CDS opt3
  source 1..549: mol_type = other RNA
atgcccagagtggtccctgaccagaggagcaagttcgagaacgaagagtttttccggaaactgtcccgcgaatgcgagatcaagtacaccggctttcgagatcgtccacacgaagagagacaagccaggttccagaatgcttgtcgggacgggcgctctgagattgcatttgttgccacaggaactaacctctcacttcagttctttccggcgagttggcagggtgaacaaagacagacgcccagcagggagtatgtggatctggaacgggaggctggcaaagtatacttgaaggcccctatgatattaaatggggtgtgcgtcatctggaaaggatggattgacctgcagcgcctagatggcatgggttgtctcgagttcgacgaggaacgagcacagcaagaagatgccctggctcagcaggcatttgaggaagccagaaggcggacccgtgagttcgaggaccgcgatagatcccatagggaagagatggaagtgcgggtttctcagcttctggctgtgacagggaagaagactacccgaccatga

SEQ ID NO: 551 - RNA, 672 nt, synthetic construct
  misc_feature 1..672: note = Homo sapiens__A0A494C0A9__CBFbeta CDS opt3
  source 1..672: mol_type = other RNA
atgcccagagtggtccctgaccagaggagcaagttcgagaacgaagagtttttccggaaactgtcccgcgaatgcgagatcaagtacaccggctttcgagatcgtccacacgaagagagacaagccaggttccagaatgcttgtcgggacgggcgctctgagattgcatttgttgccacaggaactaacctctcacttcagttctttccggcgagttggcagggtgaacaaagacagacgcccagcagggagtatgtggatctggaacgggaggctggcaaagtatacttgaaggcccctatgatattaaatggggtgtgcgtcatctggaaaggatggattgacctgcagcgcctagatggcatgggttgtctcgagttcgacgaggaacgagcacagcaagaagatgccctggctcagcaggcatttgaggaagccagaaggcggacccgtgagttcgaggaccgcgatagatcccatagggaagagatggaagtgcgggtttctcagcttctggctgtgacagagtggcgatcgactcgcaagtttagctcattctggatcccaccccctagagggtgcttttgtattgccttgaccagtagggaaaactcctcttgctggtgtgtcttcttccggctcatctggagccacctgatgacagcgtcctga

SEQ ID NO: 552 - RNA, 609 nt, synthetic construct
  misc_feature 1..609: note = Homo sapiens__J3KRT0__CBFbeta CDS opt3
  source 1..609: mol_type = other RNA
atgcccagagtggtccctgaccagaggagcaagttcgagaacgaagagtttttccggaaactgtcccgcgaatgcgagatcaagtacaccggctttcgagatcgtccacacgaagagagacaagccaggttccagaatgcttgtcgggacgggcgctctgagattgtttcaagactcgcaaggggagcccggggtagtcttgtggcgcgcggccgagggggaccgggcagatttaggacagctgcccggctgttgcgtttacccgaactgagcggtcgcagactaacttcctattctgggttcaaaatgaggaaccagatgcctcgggcaggaacgcgaggcgagaccctctttctgggccttgccgctgtagcacgcgtggggcagagatcgacagcctcaggagctaggactcgggcccgcctgaataagagaagggcgttgttccgtcggcgacatagaaggcgcgtccaaggtatatgcagcaaacagaccccaatccggaagaagaaatggagttttattcagggcttctgtgggcacagaaaccagtccgtgtctcccgtttttagcggacaactcgcaggcaggacagccaccaatacttga

SEQ ID NO: 553 - RNA, 564 nt, synthetic construct
  misc_feature 1..564: note = Homo sapiens__Q13951-2__CBFbeta CDS opt3
  source 1..564: mol_type = other RNA
atgcccagagtggtccctgaccagaggagcaagttcgagaacgaagagtttttccggaaactgtcccgcgaatgcgagatcaagtacaccggctttcgagatcgtccacacgaagagagacaagccaggttccagaatgcttgtcgggacgggcgctctgagattgcatttgttgccacaggaactaacctctcacttcagttctttccggcgagttggcagggtgaacaaagacagacgcccagcagggagtatgtggatctggaacgggaggctggcaaagtatacttgaaggcccctatgatattaaatggggtgtgcgtcatctggaaaggatggattgacctgcagcgcctagatggcatgggttgtctcgagttcgacgaggaacgagcacagcaagaagatgccctggctcagcaggcatttgaggaagccagaaggcggacccgtgagttcgaggaccgcgatagatcccatagggaagagatggaagctcggcgacagcaagacccatctcccgggtcgaaccttggaggcggcgatgacctgaagttgcgctga

SEQ ID NO: 554 - RNA, 423 nt, synthetic construct
  misc_feature 1..423: note = Homo sapiens__Q13951-1__CBFbeta(1-141) CDS opt3
  source 1..423: mol_type = other RNA
atgcccagagtggtccctgaccagaggagcaagttcgagaacgaagagtttttccggaaactgtcccgcgaatgcgagatcaagtacaccggctttcgagatcgtccacacgaagagagacaagccaggttccagaatgcttgtcgggacgggcgctctgagattgcatttgttgccacaggaactaacctctcacttcagttctttccggcgagttggcagggtgaacaaagacagacgcccagcagggagtatgtggatctggaacgggaggctggcaaagtatacttgaaggcccctatgatattaaatggggtgtgcgtcatctggaaaggatggattgacctgcagcgcctagatggcatgggttgtctcgagttcgacgaggaacgagcacagcaagaagatgccctggctcagcag

SEQ ID NO: 555 - RNA, 495 nt, synthetic construct
  misc_feature 1..495: note = Homo sapiens__Q13951-1__CBFbeta(1-165) CDS opt3
  source 1..495: mol_type = other RNA
atgcccagagtggtccctgaccagaggagcaagttcgagaacgaagagtttttccggaaactgtcccgcgaatgcgagatcaagtacaccggctttcgagatcgtccacacgaagagagacaagccaggttccagaatgcttgtcgggacgggcgctctgagattgcatttgttgccacaggaactaacctctcacttcagttctttccggcgagttggcagggtgaacaaagacagacgcccagcagggagtatgtggatctggaacgggaggctggcaaagtatacttgaaggcccctatgatattaaatggggtgtgcgtcatctggaaaggatggattgacctgcagcgcctagatggcatgggttgtctcgagttcgacgaggaacgagcacagcaagaagatgccctggctcagcaggcatttgaggaagccagaaggcggacccgtgagttcgaggaccgcgatagatcccatagggaagagatggaa

SEQ ID NO: 556 - RNA, 5919 nt, synthetic construct
  misc_feature 1..5919: note = Homo sapiens__P35749-1__SMMHC CDS opt3
  source 1..5919: mol_type = other RNA
atggcccagaagggccaactgagcgacgatgagaaattcctctttgtggacaagaacttcatcaattcccccgtcgctcaggcagattgggccgcgaaaagacttgtttgggtgccttctgaaaagcaggggtttgaggctgcctcaattaaagaagagaagggagacgaagtagtggtcgagctggtggagaacggtaagaaagttaccgtgggcaaggatgacatacagaaaatgaatccaccgaagttcagtaaagtcgaagatatggcagagttgacatgcttaaacgaagccagcgtgctgcacaatctaagggagcggtacttttccgggctcatctatacttactctggactgttctgtgtagttgtgaacccctataagcatcttcctatttactcggagaagatcgtcgacatgtataaaggcaagaaacgccacgaaatgccaccccatatttacgctatcgcagatacggcctatcgatcaatgctgcaagaccgtgaggatcagagcatattgtgcaccggtgaaagtggggctggaaagacagagaatactaaaaaggtgatccagtacctcgccgtggtcgcgtcctctcacaaaggcaagaaggacaccagcattacaggcgaactggagaaacagctgctccaagcaaaccctatcttagaggcctttgggaatgctaagaccgttaaaaacgataattcctcaagattcggaaagtttattaggatcaacttcgacgtgactggttacatagtaggcgccaatattgaaacatatctgcttgagaaaagtcgggcaatccgccaggctagagacgaaaggacctttcatattttctactatatgatcgccggggcgaaggagaagatgcggagcgatttgctgctagaaggatttaacaattacacgttcctctctaacggcttcgtgccaatccccgccgcacaggacgatgagatgtttcaggagactgtcgaagctatggccattatgggtttctccgaggaggaacaactgtcaatacttaaagtggttagcagtgtgctgcagttggggaacatcgtctttaagaaagaacgcaataccgaccaggcttctatgcctgataacacagccgcacaaaaggtgtgtcacctcatgggaattaatgtaactgacttcacccgatccatcctgacaccaagaataaaagttggcagggatgtggtccagaaggcccagaccaaggagcaggctgactttgcggtggaggcattagccaaagctacgtatgaacggctgttccgttggattctcactcgcgtcaacaaggcccttgataaaacacacagacaaggcgctagctttctggggatcttggacatcgccggattcgagatttttgaagttaattcgttcgagcagctatgcatcaactacaccaatgagaagctgcagcagctctttaaccatactatgttcattctggaacaagaggaatatcagagggagggtatagaatggaattttatcgatttcggccttgacctgcagccgtgtattgagttgatcgagcggcccaacaatcctccaggggtgctcgctctgttagacgaagagtgctggttccccaaagccacagataagtcttttgtggaaaagctgtgtaccgagcagggatcccaccctaaattccaaaagccaaaacagctaaaggacaaaacggaattttcaatcattcattacgcaggcaaggtagattacaacgcgagtgcttggctcaccaaaaatatggaccccctgaacgataatgtcacaagccttttgaacgcctcctctgacaagttcgtggcagatctgtggaaggacgttgatcgaatagtgggtctcgaccagatggccaaaatgactgagagctcactgccgagtgcttccaagaccaaaaaggggatgtttcgcacagtcggccagctttataaagagcaactgggaaagttgatgactaccctcagaaacacaacccctaatttcgtgaggtgcatcattcccaaccacgaaaagcggagcggcaaactggatgcctttttagtactggagcagctacgctgtaatggggtgctcgaaggaatcagaatttgcaggcagggtttcccaaaccgtatcgtttttcaagagttccggcagcgatacgaaatactggcagctaatgccatccctaagggctttatggacgggaaacaggcgtgtattcttatgatcaaggccttggagctggatcccaacctctatagaattggacagtctaaaatcttctttaggactggcgtcctggctcacttagaggaggaacgcgacctgaagataacggacgtgattatggcattccaagccatgtgccggggttaccttgctagaaaggccttcgcaaaaaggcagcagcagttgacagcgatgaaggtgatccaacgcaattgcgccgcttatctcaaactgcgaaactggcagtggtggcggctatttaccaaggtcaaaccactgctccaggttactcgtcaggaagaggagatgcaagccaaggaagatgagctgcagaagaccaaagaaagacagcaaaaggcagagaatgaacttaaagagttggagcagaagcattcacagctgacagaagagaaaaacttactccaggaacaactgcaggctgagaccgaactttacgccgaggcagaggaaatgagggtgcgcctggccgctaagaaacaggagttggaagagattctccacgaaatggaggcgcggctggaggaagaggaagacagagggcagcaactacaggccgagaggaagaagatggcacagcagatgctggatctcgaggaacaactggaggaagaggaagctgcccgacagaaacttcagttggagaaggtgactgccgaggctaaaatcaagaaactggaagacgagatattagtaatggatgaccagaataacaagctcagtaaggaacgcaaactgcttgaggaacggatcagcgatctgacaacgaatctagcagaggaggaagagaaggccaaaaacctcaccaagctgaaaaataagcatgaatccatgatttctgagttggaagtcagactgaagaaagaggagaagtcgaggcaagaattagagaaactcaagcgtaaactggaaggcgacgcgagcgatttccacgagcagatcgctgaccttcaggcccaaattgcagagctgaagatgcagttggccaagaaagaagaggaactccaggctgcactggcccgcctagatgacgagatcgcgcagaagaacaacgctctgaaaaagatacgggaacttgagggacatatttccgatctccaagaggacctggactcagaaagagccgcaaggaataaagccgagaagcagaagcgagatttgggcgaggaactggaagcattaaaaactgagctcgaggacacactggatagtaccgccacacagcaggaacttcgggcaaagcgcgagcaagaagtgactgttctgaaaaaggctttggacgaggaaaccagatctcacgaggcccaggtgcaggagatgaggcagaaacacgcgcaagccgtcgaggaactcacggaacagctggagcagtttaagcgggcaaaagctaacctagataagaataagcaaaccctggagaaagaaaacgccgaccttgctggggagctccgagtgctgggacaggcaaagcaggaagttgagcataaaaagaaaaagttggaagcccaggtgcaagagttacagagcaagtgttccgatggtgagagagcccgcgctgaactgaatgacaaagtacacaagctccagaacgaggtcgaatcagtgacaggcatgctgaatgaggcggaagggaaagcaatcaaacttgccaaagatgtggctagcctgtcttcccagttgcaagacactcaggagctactgcaggaggaaaccaggcagaagctcaacgtcagtacaaagctgcgtcaacttgaggaggaacggaatagcttacaggatcagctggacgaagagatggaggccaaacagaacctcgaaagacatatctctactttgaatattcaactgtccgactcaaagaaaaagctccaggatttcgcaagtaccgttgaggccctggaagagggaaagaagaggtttcagaaggagatcgaaaaccttacgcaacagtatgaggaaaaagctgcggcctacgacaagctggagaaaacaaagaatcgcttgcagcaggaactagatgacctggtggtagatctcgacaaccaacgacagttagtgagcaatctggagaaaaagcagagaaaattcgatcagcttctggcagaggaaaagaacatttcgtccaagtacgctgacgagcgggatagggccgaagcagaggcccgcgaaaaagagaccaaggctctctctttggcccgtgcgctggaggaagcactcgaggccaaagaggaactggaaagaactaacaagatgcttaaagctgagatggaggacctagtcagctcaaaggatgacgtgggcaagaatgttcacgaactggagaaaagtaagcgggccttggaaacacaaatggaggagatgaaaacccagttagaggaactggaagatgagctccaggctactgaagacgcaaagctgaggcttgaggtgaacatgcaggccctgaaaggtcaatttgagcgcgacctccaggctcgagatgaacagaatgaggaaaagagacggcaattgcagaggcagctgcacgagtatgaaaccgagctagaggacgaacgcaagcagagagccctggcagcggccgctaaaaagaaactcgagggggatcttaaggacctggaattacaagccgattccgcaataaaaggcagggaggaagctatcaagcagttgcggaagctgcaggcccagatgaaagacttccaacgtgagctcgaggatgcacgcgcctctcgagacgaaatttttgctacagcgaaggagaacgaaaagaaggccaaaagcctggaggcagatcttatgcagctgcaggaggacctcgctgccgccgaaagagcaaggaagcaggctgatttggagaaagaggaactggccgaagagttagcgtcctcactaagcggacggaatgctctgcaagacgagaagcgcagactcgaagccaggatcgcacagcttgaggaggaactggaagaggagcagggcaacatggaagccatgagtgatcgggtccgaaaggctacgcaacaggcagagcagttgtctaatgaactggccaccgagagatccactgcgcagaaaaacgaaagcgctcgccaacagctcgagaggcagaataaggagctgcggtcgaaacttcatgaaatggagggggccgtgaagtcaaaattcaagtctacaattgcagccctcgaagctaagatcgcccagctggaggagcaagttgaacaggaggcacgtgaaaaacaggctgccaccaagagtttgaaacagaaggacaaaaagctgaaggagatattactacaagtggaagacgagagaaaaatggcggagcagtacaaggaacaggccgagaaaggaaacgcaagggtcaagcagctgaaacgccaactcgaagaggctgaagaggagtcccagcggatcaatgccaaccgaagaaaacttcagagggaactggatgaggcaacagaaagcaatgaggctatgggccgcgaagtaaacgccttgaagtctaaactgcggagaggtaatgagactagctttgtgccctcccgtaggtcagggggacggcgcgttattgagaacgccgacggcagtgaagaggaaaccgatacgcgagacgcggatttcaatggtacaaaggctagcgagtga

SEQ ID NO: 557 - RNA, 5940 nt, synthetic construct
  misc_feature 1..5940: note = Homo sapiens__P35749-2__SMMHC CDS opt3
  source 1..5940: mol_type = other RNA
atggcccagaagggccaactgagcgacgatgagaaattcctctttgtggacaagaacttcatcaattcccccgtcgctcaggcagattgggccgcgaaaagacttgtttgggtgccttctgaaaagcaggggtttgaggctgcctcaattaaagaagagaagggagacgaagtagtggtcgagctggtggagaacggtaagaaagttaccgtgggcaaggatgacatacagaaaatgaatccaccgaagttcagtaaagtcgaagatatggcagagttgacatgcttaaacgaagccagcgtgctgcacaatctaagggagcggtacttttccgggctcatctatacttactctggactgttctgtgtagttgtgaacccctataagcatcttcctatttactcggagaagatcgtcgacatgtataaaggcaagaaacgccacgaaatgccaccccatatttacgctatcgcagatacggcctatcgatcaatgctgcaagaccgtgaggatcagagcatattgtgcaccggtgaaagtggggctggaaagacagagaatactaaaaaggtgatccagtacctcgccgtggtcgcgtcctctcacaaaggcaagaaggacaccagcattacacagggcccttcctttgcatacggggaactggagaaacaactgctccaggccaacccaatcttagaggctttcggaaatgccaagaccgttaaaaacgataattcaagtagatttggtaagttcattaggatcaactttgacgtgactggctatatagtaggggcaaatattgaaacatacctgcttgagaaaagccgggctatccgccaggccagagacgaaaggaccttccatatcttttattacatgattgcgggagccaaggagaagatgcggtctgatttgctgctagaaggcttcaacaattatacgttcctctccaacggttttgtgcccatccctgcagctcaggacgatgagatgttccaagagactgtcgaagccatggctattatggggttttcagaggaggagcagctgagcatacttaaagtggttagttctgtgctgcagttgggaaacatcgtcttcaagaaagaacgcaataccgaccaagcctccatgccagataacacagcagcccagaaggtgtgtcacctcatgggcattaatgtaactgactttacccgaagcatcctgacaccgagaataaaagttggcagggatgtggtccagaaggctcagaccaaggagcaagcggacttcgcagtggaggccttagctaaagccacgtacgaacggctgtttcgttggattctcactcgcgtcaacaaggcacttgataaaacacacagacagggggcctcgttcctgggaatcttggacatcgctggttttgagattttcgaagttaattcttttgagcagctatgcatcaactataccaatgagaagctgcagcaactcttcaaccatactatgtttattctggaacaggaggaataccagagggagggcatagaatggaatttcatcgatttcgggcttgacctgcagccctgtattgagttgatcgagcggcctaacaatccacccggagtgctcgccctgttagacgaagagtgctggtttcctaaagcaacagataagtccttcgtggaaaagctgtgtaccgagcaaggctcacacccaaaatttcagaagcccaaacagctaaaggacaaaacggagttcagtatcattcattacgcgggtaaggtagattataacgctagcgcctggctcaccaaaaatatggacccgctgaacgataatgtcacatcccttttgaacgcatctagcgacaagtttgtggccgatctgtggaaggacgttgatcgaatagtggggctcgaccagatggctaaaatgactgaatcaagtctgccttccgccagcaagaccaaaaagggcatgttccgcacagtcggacaactttacaaagagcagctgggcaagttgatgactaccctcagaaacacaacccccaattttgtgaggtgcatcattccaaaccacgaaaagcggtctgggaaactggatgcattcttagtactggagcagctacgctgtaatggagtgctcgaaggtatcagaatttgcaggcaaggctttcctaaccgtatcgttttccaggagtttcggcagcgatatgaaatactggctgccaatgcgatccccaaggggttcatggacggaaaacaggcctgtattcttatgatcaaggctttggagctggatccaaacctctacagaattggccaatcaaaaatctttttcaggactggtgtcctggcacacttagaggaggaacgcgacctgaagataacggacgtgattatggccttccaggctatgtgccgggggtatcttgccagaaaggcatttgcgaaaaggcagcagcaattgacagccatgaaggtgatccagcgcaattgcgctgcctacctcaaactgcgaaactggcagtggtggcggctattcaccaaggtcaaacccctgctccaggttactcgtcaagaagaggagatgcaggcaaaggaagatgagctgcagaagaccaaagaaagacaacagaaggctgagaatgaacttaaagagttggagcagaagcatagtcagctgacagaagagaaaaacttactccaagaacagctgcaggccgagaccgaactttatgcagaggccgaggaaatgagggtgcgcctggctgcgaagaaacaggagttggaagagattctccacgaaatggaggcccggctggaggaagaggaagacagaggccaacagctacaggcagagaggaagaagatggctcagcaaatgctggatctcgaggaacagctggaggaagaggaagccgcccgacagaaacttcagttggagaaggtgactgctgaggcaaaaatcaagaaactggaagacgagatattagtaatggatgaccaaaataacaagctcagcaaggaacgcaaactgcttgaggaacggatctccgatctgacaacgaatctagccgaggaggaagagaaggcgaaaaacctcaccaagctgaaaaataagcatgaatctatgatttcggagttggaagtcagactgaagaaagaggaaaagagcaggcaggaattagagaaactcaagcgtaaactggaaggagacgcttccgattttcacgagcagatcgccgaccttcaagcacagattgccgagctgaagatgcagttggctaagaaagaagaggaactccaggcagccctggcgcgcctagatgacgagatcgctcaaaagaacaacgccctgaaaaagatacgggaacttgagggccatatttcagatctccaggaggacctggacagtgaaagagcagccaggaataaagctgagaagcagaagcgagatttgggggaggaactggaagccttaaaaactgagctcgaggacacactggattctaccgcaacacagcaagaacttcgggctaagcgcgagcaggaagtgactgttctgaaaaaggccttggacgaggaaaccagaagccacgaggcccaggtgcaggagatgaggcaaaaacacgcgcaggcagtcgaggaactcacggaacagctggagcaattcaagcgggctaaagccaacctagataagaataagcagaccctggagaaagaaaacgctgaccttgcaggagagctccgagtgctgggtcaggccaagcaggaagttgagcataaaaagaaaaagttggaagcccaagtgcaggagttacagtccaagtgttcagatggcgagagagctcgcgcggaactgaatgacaaagtacacaagctccagaacgaggtcgaaagcgtgacagggatgctgaatgaggcagaaggaaaagccatcaagttggctaaagatgtggcctctctgtccagtcaattgcaggacactcaggagctactgcaggaggaaaccaggcaaaagctcaacgtcagcacaaagctgcgtcagcttgaggaagagagaaattctttacaggatcagctggacgaagagatggaggcaaaacaaaacctcgaacggcatatctccactttgaatattcagctgtcagacagtaagaaaaagctccaggattttgccagcaccgttgaggctctggaagagggcaaaaagaggttccaaaaggagatcgaaaaccttacgcagcagtacgaggaaaaagcggccgcatacgacaagctggagaaaacaaagaatcgcttgcagcaagaactagatgacctggtggtagatctcgacaaccagcgacagttagtgtcgaatctggagaaaaagcagagaaaatttgatcaacttctggctgaggaaaagaacatttcctctaagtatgccgacgagcgggatagggcagaagccgaggctcgcgaaaaagagaccaaggccctcagcttggcgcgtgcactggaggaagccctcgaggctaaagaggaactggaaagaactaacaagatgcttaaagccgagatggaggacctagtctcaagtaaggatgacgtgggtaagaatgttcacgaactggagaaatccaagcgggctttggaaacacagatggaggagatgaaaacccagttagaggaactggaagatgagctccaggcaactgaagacgccaagctgaggcttgaggtgaacatgcaagctctgaaagggcagttcgagcgcgacctccaggcccgagatgaacaaaatgaggaaaagagacggcagttgcagaggcagctgcacgagtacgaaaccgagctagaggacgaacgcaagcaaagagcactggcggccgctgccaaaaagaaactcgagggcgatcttaaggacctggaattacaggcagattctgctataaaaggaagggaggaagccatcaagcagttgcggaagctgcaggcacaaatgaaagactttcagcgtgagctcgaggatgcccgcgctagccgagacgaaattttcgcgacagccaaggagaacgaaaagaaggcaaaatccctggaggctgatcttatgcagctgcaggaggacctcgccgccgcagaaagagctaggaagcaagccgatttggagaaagaggaactggcggaagagttagcttcaagcctaagtggccggaatgccctgcaggacgagaagcgcagactcgaagcaaggatcgcccagcttgaggaggaactggaagaggagcaagggaacatggaagctatgtctgatcgggtccgaaaggcaacgcagcaggccgagcagttgtccaatgaactggcgaccgagagaagcactgctcagaaaaacgaatcggcccgccaacagctcgagaggcagaataaggagctgcggtcaaaacttcatgaaatggagggagcagtgaagtctaaatttaagagtacaattgccgctctcgaagccaagatcgcacaactggaggagcaggttgaacaggaggctcgtgaaaaacaggccgcgaccaagtccttgaaacaaaaggacaaaaagctgaaggagatattactacaggtggaagacgagagaaaaatggccgagcagtataaggaacaggcagagaaaggcaacgctagggtcaagcaactgaaacgccagctcgaagaggccgaagaggagagccagcggatcaatgcaaaccgaagaaaacttcaaagggaactggatgaggctacagaatctaatgaggccatgggtcgcgaagtaaacgcccttaagagcaaactgcggagagggaatgagacttccttcgtgccttcacgtaggagtggaggccggcgcgttattgagaacgcggacggtagcgaagaggaaaccgatacgcgagacgctgatttcaatggcacaaaggcatctgagtga

SEQ ID NO: 558 - RNA, 5838 nt, synthetic construct
  misc_feature 1..5838: note = Homo sapiens__P35749-3__SMMHC CDS opt3
  source 1..5838: mol_type = other RNA
atggcccagaagggccaactgagcgacgatgagaaattcctctttgtggacaagaacttcatcaattcccccgtcgctcaggcagattgggccgcgaaaagacttgtttgggtgccttctgaaaagcaggggtttgaggctgcctcaattaaagaagagaagggagacgaagtagtggtcgagctggtggagaacggtaagaaagttaccgtgggcaaggatgacatacagaaaatgaatccaccgaagttcagtaaagtcgaagatatggcagagttgacatgcttaaacgaagccagcgtgctgcacaatctaagggagcggtacttttccgggctcatctatacttactctggactgttctgtgtagttgtgaacccctataagcatcttcctatttactcggagaagatcgtcgacatgtataaaggcaagaaacgccacgaaatgccaccccatatttacgctatcgcagatacggcctatcgatcaatgctgcaagaccgtgaggatcagagcatattgtgcaccggtgaaagtggggctggaaagacagagaatactaaaaaggtgatccagtacctcgccgtggtcgcgtcctctcacaaaggcaagaaggacaccagcattacacagggcccttcctttgcatacggggaactggagaaacaactgctccaggccaacccaatcttagaggctttcggaaatgccaagaccgttaaaaacgataattcaagtagatttggtaagttcattaggatcaactttgacgtgactggctatatagtaggggcaaatattgaaacatacctgcttgagaaaagccgggctatccgccaggccagagacgaaaggaccttccatatcttttattacatgattgcgggagccaaggagaagatgcggtctgatttgctgctagaaggcttcaacaattatacgttcctctccaacggttttgtgcccatccctgcagctcaggacgatgagatgttccaagagactgtcgaagccatggctattatggggttttcagaggaggagcagctgagcatacttaaagtggttagttctgtgctgcagttgggaaacatcgtcttcaagaaagaacgcaataccgaccaagcctccatgccagataacacagcagcccagaaggtgtgtcacctcatgggcattaatgtaactgactttacccgaagcatcctgacaccgagaataaaagttggcagggatgtggtccagaaggctcagaccaaggagcaagcggacttcgcagtggaggccttagctaaagccacgtacgaacggctgtttcgttggattctcactcgcgtcaacaaggcacttgataaaacacacagacagggggcctcgttcctgggaatcttggacatcgctggttttgagattttcgaagttaattcttttgagcagctatgcatcaactataccaatgagaagctgcagcaactcttcaaccatactatgtttattctggaacaggaggaataccagagggagggcatagaatggaatttcatcgatttcgggcttgacctgcagccctgtattgagttgatcgagcggcctaacaatccacccggagtgctcgccctgttagacgaagagtgctggtttcctaaagcaacagataagtccttcgtggaaaagctgtgtaccgagcaaggctcacacccaaaatttcagaagcccaaacagctaaaggacaaaacggagttcagtatcattcattacgcgggtaaggtagattataacgctagcgcctggctcaccaaaaatatggacccgctgaacgataatgtcacatcccttttgaacgcatctagcgacaagtttgtggccgatctgtggaaggacgttgatcgaatagtggggctcgaccagatggctaaaatgactgaatcaagtctgccttccgccagcaagaccaaaaagggcatgttccgcacagtcggacaactttacaaagagcagctgggcaagttgatgactaccctcagaaacacaacccccaattttgtgaggtgcatcattccaaaccacgaaaagcggtctgggaaactggatgcattcttagtactggagcagctacgctgtaatggagtgctcgaaggtatcagaatttgcaggcaaggctttcctaaccgtatcgttttccaggagtttcggcagcgatatgaaatactggctgccaatgcgatccccaaggggttcatggacggaaaacaggcctgtattcttatgatcaaggctttggagctggatccaaacctctacagaattggccaatcaaaaatctttttcaggactggtgtcctggcacacttagaggaggaacgcgacctgaagataacggacgtgattatggccttccaggctatgtgccgggggtatcttgccagaaaggcatttgcgaaaaggcagcagcaattgacagccatgaaggtgatccagcgcaattgcgctgcctacctcaaactgcgaaactggcagtggtggcggctattcaccaaggtcaaacccctgctccaggttactcgtcaagaagaggagatgcaggcaaaggaagatgagctgcagaagaccaaagaaagacaacagaaggctgagaatgaacttaaagagttggagcagaagcatagtcagctgacagaagagaaaaacttactccaagaacagctgcaggccgagaccgaactttatgcagaggccgaggaaatgagggtgcgcctggctgcgaagaaacaggagttggaagagattctccacgaaatggaggcccggctggaggaagaggaagacagaggccaacagctacaggcagagaggaagaagatggctcagcaaatgctggatctcgaggaacagctggaggaagaggaagccgcccgacagaaacttcagttggagaaggtgactgctgaggcaaaaatcaagaaactggaagacgagatattagtaatggatgaccaaaataacaagctcagcaaggaacgcaaactgcttgaggaacggatctccgatctgacaacgaatctagccgaggaggaagagaaggcgaaaaacctcaccaagctgaaaaataagcatgaatctatgatttcggagttggaagtcagactgaagaaagaggaaaagagcaggcaggaattagagaaactcaagcgtaaactggaaggagacgcttccgattttcacgagcagatcgccgaccttcaagcacagattgccgagctgaagatgcagttggctaagaaagaagaggaactccaggcagccctggcgcgcctagatgacgagatcgctcaaaagaacaacgccctgaaaaagatacgggaacttgagggccatatttcagatctccaggaggacctggacagtgaaagagcagccaggaataaagctgagaagcagaagcgagatttgggggaggaactggaagccttaaaaactgagctcgaggacacactggattctaccgcaacacagcaagaacttcgggctaagcgcgagcaggaagtgactgttctgaaaaaggccttggacgaggaaaccagaagccacgaggcccaggtgcaggagatgaggcaaaaacacgcgcaggcagtcgaggaactcacggaacagctggagcaattcaagcgggctaaagccaacctagataagaataagcagaccctggagaaagaaaacgctgaccttgcaggagagctccgagtgctgggtcaggccaagcaggaagttgagcataaaaagaaaaagttggaagcccaagtgcaggagttacagtccaagtgttcagatggcgagagagctcgcgcggaactgaatgacaaagtacacaagctccagaacgaggtcgaaagcgtgacagggatgctgaatgaggcagaaggaaaagccatcaagttggctaaagatgtggcctctctgtccagtcaattgcaggacactcaggagctactgcaggaggaaaccaggcaaaagctcaacgtcagcacaaagctgcgtcagcttgaggaagagagaaattctttacaggatcagctggacgaagagatggaggcaaaacaaaacctcgaacggcatatctccactttgaatattcagctgtcagacagtaagaaaaagctccaggattttgccagcaccgttgaggctctggaagagggcaaaaagaggttccaaaaggagatcgaaaaccttacgcagcagtacgaggaaaaagcggccgcatacgacaagctggagaaaacaaagaatcgcttgcagcaagaactagatgacctggtggtagatctcgacaaccagcgacagttagtgtcgaatctggagaaaaagcagagaaaatttgatcaacttctggctgaggaaaagaacatttcctctaagtatgccgacgagcgggatagggcagaagccgaggctcgcgaaaaagagaccaaggccctcagcttggcgcgtgcactggaggaagccctcgaggctaaagaggaactggaaagaactaacaagatgcttaaagccgagatggaggacctagtctcaagtaaggatgacgtgggtaagaatgttcacgaactggagaaatccaagcgggctttggaaacacagatggaggagatgaaaacccagttagaggaactggaagatgagctccaggcaactgaagacgccaagctgaggcttgaggtgaacatgcaagctctgaaagggcagttcgagcgcgacctccaggcccgagatgaacaaaatgaggaaaagagacggcagttgcagaggcagctgcacgagtacgaaaccgagctagaggacgaacgcaagcaaagagcactggcggccgctgccaaaaagaaactcgagggcgatcttaaggacctggaattacaggcagattctgctataaaaggaagggaggaagccatcaagcagttgcggaagctgcaggcacaaatgaaagactttcagcgtgagctcgaggatgcccgcgctagccgagacgaaattttcgcgacagccaaggagaacgaaaagaaggcaaaatccctggaggctgatcttatgcagctgcaggaggacctcgccgccgcagaaagagctaggaagcaagccgatttggagaaagaggaactggcggaagagttagcttcaagcctaagtggccggaatgccctgcaggacgagaagcgcagactcgaagcaaggatcgcccagcttgaggaggaactggaagaggagcaagggaacatggaagctatgtctgatcgggtccgaaaggcaacgcagcaggccgagcagttgtccaatgaactggcgaccgagagaagcactgctcagaaaaacgaatcggcccgccaacagctcgagaggcagaataaggagctgcggtcaaaacttcatgaaatggagggagcagtgaagtctaaatttaagagtacaattgccgctctcgaagccaagatcgcacaactggaggagcaggttgaacaggaggctcgtgaaaaacaggccgcgaccaagtccttgaaacaaaaggacaaaaagctgaaggagatattactacaggtggaagacgagagaaaaatggccgagcagtataaggaacaggcagagaaaggcaacgctagggtcaagcaactgaaacgccagctcgaagaggccgaagaggagagccagcggatcaatgcaaaccgaagaaaacttcaaagggaactggatgaggctacagaatctaatgaggccatgggtcgcgaagtaaacgcccttaagagcaaactgcgggggcctccaccgcaggagacttcccagtga

SEQ ID NO: 559 - RNA, 5817 nt, synthetic construct
  misc_feature 1..5817: note = Homo sapiens__P35749-4__SMMHC CDS opt3
  source 1..5817: mol_type = other RNA
atggcccagaagggccaactgagcgacgatgagaaattcctctttgtggacaagaacttcatcaattcccccgtcgctcaggcagattgggccgcgaaaagacttgtttgggtgccttctgaaaagcaggggtttgaggctgcctcaattaaagaagagaagggagacgaagtagtggtcgagctggtggagaacggtaagaaagttaccgtgggcaaggatgacatacagaaaatgaatccaccgaagttcagtaaagtcgaagatatggcagagttgacatgcttaaacgaagccagcgtgctgcacaatctaagggagcggtacttttccgggctcatctatacttactctggactgttctgtgtagttgtgaacccctataagcatcttcctatttactcggagaagatcgtcgacatgtataaaggcaagaaacgccacgaaatgccaccccatatttacgctatcgcagatacggcctatcgatcaatgctgcaagaccgtgaggatcagagcatattgtgcaccggtgaaagtggggctggaaagacagagaatactaaaaaggtgatccagtacctcgccgtggtcgcgtcctctcacaaaggcaagaaggacaccagcattacaggcgaactggagaaacagctgctccaagcaaaccctatcttagaggcctttgggaatgctaagaccgttaaaaacgataattcctcaagattcggaaagtttattaggatcaacttcgacgtgactggttacatagtaggcgccaatattgaaacatatctgcttgagaaaagtcgggcaatccgccaggctagagacgaaaggacctttcatattttctactatatgatcgccggggcgaaggagaagatgcggagcgatttgctgctagaaggatttaacaattacacgttcctctctaacggcttcgtgccaatccccgccgcacaggacgatgagatgtttcaggagactgtcgaagctatggccattatgggtttctccgaggaggaacaactgtcaatacttaaagtggttagcagtgtgctgcagttggggaacatcgtctttaagaaagaacgcaataccgaccaggcttctatgcctgataacacagccgcacaaaaggtgtgtcacctcatgggaattaatgtaactgacttcacccgatccatcctgacaccaagaataaaagttggcagggatgtggtccagaaggcccagaccaaggagcaggctgactttgcggtggaggcattagccaaagctacgtatgaacggctgttccgttggattctcactcgcgtcaacaaggcccttgataaaacacacagacaaggcgctagctttctggggatcttggacatcgccggattcgagatttttgaagttaattcgttcgagcagctatgcatcaactacaccaatgagaagctgcagcagctctttaaccatactatgttcattctggaacaagaggaatatcagagggagggtatagaatggaattttatcgatttcggccttgacctgcagccgtgtattgagttgatcgagcggcccaacaatcctccaggggtgctcgctctgttagacgaagagtgctggttccccaaagccacagataagtcttttgtggaaaagctgtgtaccgagcagggatcccaccctaaattccaaaagccaaaacagctaaaggacaaaacggaattttcaatcattcattacgcaggcaaggtagattacaacgcgagtgcttggctcaccaaaaatatggaccccctgaacgataatgtcacaagccttttgaacgcctcctctgacaagttcgtggcagatctgtggaaggacgttgatcgaatagtgggtctcgaccagatggccaaaatgactgagagctcactgccgagtgcttccaagaccaaaaaggggatgtttcgcacagtcggccagctttataaagagcaactgggaaagttgatgactaccctcagaaacacaacccctaatttcgtgaggtgcatcattcccaaccacgaaaagcggagcggcaaactggatgcctttttagtactggagcagctacgctgtaatggggtgctcgaaggaatcagaatttgcaggcagggtttcccaaaccgtatcgtttttcaagagttccggcagcgatacgaaatactggcagctaatgccatccctaagggctttatggacgggaaacaggcgtgtattcttatgatcaaggccttggagctggatcccaacctctatagaattggacagtctaaaatcttctttaggactggcgtcctggctcacttagaggaggaacgcgacctgaagataacggacgtgattatggcattccaagccatgtgccggggttaccttgctagaaaggccttcgcaaaaaggcagcagcagttgacagcgatgaaggtgatccaacgcaattgcgccgcttatctcaaactgcgaaactggcagtggtggcggctatttaccaaggtcaaaccactgctccaggttactcgtcaggaagaggagatgcaagccaaggaagatgagctgcagaagaccaaagaaagacagcaaaaggcagagaatgaacttaaagagttggagcagaagcattcacagctgacagaagagaaaaacttactccaggaacaactgcaggctgagaccgaactttacgccgaggcagaggaaatgagggtgcgcctggccgctaagaaacaggagttggaagagattctccacgaaatggaggcgcggctggaggaagaggaagacagagggcagcaactacaggccgagaggaagaagatggcacagcagatgctggatctcgaggaacaactggaggaagaggaagctgcccgacagaaacttcagttggagaaggtgactgccgaggctaaaatcaagaaactggaagacgagatattagtaatggatgaccagaataacaagctcagtaaggaacgcaaactgcttgaggaacggatcagcgatctgacaacgaatctagcagaggaggaagagaaggccaaaaacctcaccaagctgaaaaataagcatgaatccatgatttctgagttggaagtcagactgaagaaagaggagaagtcgaggcaagaattagagaaactcaagcgtaaactggaaggcgacgcgagcgatttccacgagcagatcgctgaccttcaggcccaaattgcagagctgaagatgcagttggccaagaaagaagaggaactccaggctgcactggcccgcctagatgacgagatcgcgcagaagaacaacgctctgaaaaagatacgggaacttgagggacatatttccgatctccaagaggacctggactcagaaagagccgcaaggaataaagccgagaagcagaagcgagatttgggcgaggaactggaagcattaaaaactgagctcgaggacacactggatagtaccgccacacagcaggaacttcgggcaaagcgcgagcaagaagtgactgttctgaaaaaggctttggacgaggaaaccagatctcacgaggcccaggtgcaggagatgaggcagaaacacgcgcaagccgtcgaggaactcacggaacagctggagcagtttaagcgggcaaaagctaacctagataagaataagcaaaccctggagaaagaaaacgccgaccttgctggggagctccgagtgctgggacaggcaaagcaggaagttgagcataaaaagaaaaagttggaagcccaggtgcaagagttacagagcaagtgttccgatggtgagagagcccgcgctgaactgaatgacaaagtacacaagctccagaacgaggtcgaatcagtgacaggcatgctgaatgaggcggaagggaaagcaatcaaacttgccaaagatgtggctagcctgtcttcccagttgcaagacactcaggagctactgcaggaggaaaccaggcagaagctcaacgtcagtacaaagctgcgtcaacttgaggaggaacggaatagcttacaggatcagctggacgaagagatggaggccaaacagaacctcgaaagacatatctctactttgaatattcaactgtccgactcaaagaaaaagctccaggatttcgcaagtaccgttgaggccctggaagagggaaagaagaggtttcagaaggagatcgaaaaccttacgcaacagtatgaggaaaaagctgcggcctacgacaagctggagaaaacaaagaatcgcttgcagcaggaactagatgacctggtggtagatctcgacaaccaacgacagttagtgagcaatctggagaaaaagcagagaaaattcgatcagcttctggcagaggaaaagaacatttcgtccaagtacgctgacgagcgggatagggccgaagcagaggcccgcgaaaaagagaccaaggctctctctttggcccgtgcgctggaggaagcactcgaggccaaagaggaactggaaagaactaacaagatgcttaaagctgagatggaggacctagtcagctcaaaggatgacgtgggcaagaatgttcacgaactggagaaaagtaagcgggccttggaaacacaaatggaggagatgaaaacccagttagaggaactggaagatgagctccaggctactgaagacgcaaagctgaggcttgaggtgaacatgcaggccctgaaaggtcaatttgagcgcgacctccaggctcgagatgaacagaatgaggaaaagagacggcaattgcagaggcagctgcacgagtatgaaaccgagctagaggacgaacgcaagcagagagccctggcagcggccgctaaaaagaaactcgagggggatcttaaggacctggaattacaagccgattccgcaataaaaggcagggaggaagctatcaagcagttgcggaagctgcaggcccagatgaaagacttccaacgtgagctcgaggatgcacgcgcctctcgagacgaaatttttgctacagcgaaggagaacgaaaagaaggccaaaagcctggaggcagatcttatgcagctgcaggaggacctcgctgccgccgaaagagcaaggaagcaggctgatttggagaaagaggaactggccgaagagttagcgtcctcactaagcggacggaatgctctgcaagacgagaagcgcagactcgaagccaggatcgcacagcttgaggaggaactggaagaggagcagggcaacatggaagccatgagtgatcgggtccgaaaggctacgcaacaggcagagcagttgtctaatgaactggccaccgagagatccactgcgcagaaaaacgaaagcgctcgccaacagctcgagaggcagaataaggagctgcggtcgaaacttcatgaaatggagggggccgtgaagtcaaaattcaagtctacaattgcagccctcgaagctaagatcgcccagctggaggagcaagttgaacaggaggcacgtgaaaaacaggctgccaccaagagtttgaaacagaaggacaaaaagctgaaggagatattactacaagtggaagacgagagaaaaatggcggagcagtacaaggaacaggccgagaaaggaaacgcaagggtcaagcagctgaaacgccaactcgaagaggctgaagaggagtcccagcggatcaatgccaaccgaagaaaacttcagagggaactggatgaggcaacagaaagcaatgaggctatgggccgcgaagtaaacgccttgaagtctaaactgcggggtccccctccacaagagactagccagtga

SEQ ID NO: 560 - RNA, 1338 nt, synthetic construct
  misc_feature 1..1338: note = Homo sapiens__P35749-1__SMMHC(1527-1972) CDS opt3
  source 1..1338: mol_type = other RNA
gtgcacgagctggaaaagagcaaaagagccctcgagacccagatggaagagatgaagacacaacttgaagaactggaggacgaattgcaggctactgaggatgcaaaattaaggctggaagtcaacatgcaggccctaaagggccagttcgagcgggacctccaagcgcgcgatgagcagaatgaagagaaacgacgtcagctgcagagacaacttcatgaatacgagacggaactggaggacgagaggaagcagcgggctttggccgcagccgctaagaaaaagctcgaaggggatctgaaagacctggagctccaggcagattccgccatcaagggacgcgaagaggctattaaacagttaagaaagctgcaagcccagatgaaggactttcagagggaacttgaggatgcgcgggcatctcgcgacgagatattcgccaccgctaaagaaaacgagaagaaagccaagtcattggaagcagatctgatgcaactacaggaggacctcgctgccgcggaacgagccagaaaacaggcagatctggagaaggaggaacttgctgaggaactggccagtagcttgtccggtaggaatgctctccaggacgagaaacggcgtctggaggcccgcatcgcacaattagaagaggaactggaggaggagcagggcaacatggaggccatgtctgacagagttaggaaggctacacagcaggcggaacaactctcgaatgagcttgcaactgaacggtcaaccgcccagaagaacgagagcgctcgacagcagctggaacgccaaaataaagagttgagaagtaagctacacgagatggaaggggccgtgaaatccaagtttaaatctacaattgcagccctggaggctaagatcgcccagctcgaggaacaggtagaacaggaggcaagggagaagcaagcggctaccaaaagcctgaagcagaaagataagaaacttaaggaaattctgctccaggtggaggacgaacggaagatggccgagcaatataaagagcaggcagaaaagggaaacgcccgcgtcaaacagttgaagagacagctggaggaagctgaggaagagtcccaaaggatcaatgccaaccgtcggaaattacagcgagagctggatgaagcaactgagtcaaatgaagctatgggcagagaggtgaacgccctaaagagtaagctcaggcgcggtaatgaaaccagcttcgttccctctcggagatccgggggaaggcgcgtgatagagaacgcggacggctcagaggaagagacagatacgcgagacgccgattttaatggcactaaagctagcgaa

SEQ ID NO: 561 - RNA, 1053 nt, synthetic construct
  misc_feature 1..1053: note = Homo sapiens__P35749-1__SMMHC(1527-1877) CDS opt3
  source 1..1053: mol_type = other RNA
gtgcacgagctggaaaagagcaaaagagccctcgagacccagatggaagagatgaagacacaacttgaagaactggaggacgaattgcaggctactgaggatgcaaaattaaggctggaagtcaacatgcaggccctaaagggccagttcgagcgggacctccaagcgcgcgatgagcagaatgaagagaaacgacgtcagctgcagagacaacttcatgaatacgagacggaactggaggacgagaggaagcagcgggctttggccgcagccgctaagaaaaagctcgaaggggatctgaaagacctggagctccaggcagattccgccatcaagggacgcgaagaggctattaaacagttaagaaagctgcaagcccagatgaaggactttcagagggaacttgaggatgcgcgggcatctcgcgacgagatattcgccaccgctaaagaaaacgagaagaaagccaagtcattggaagcagatctgatgcaactacaggaggacctcgctgccgcggaacgagccagaaaacaggcagatctggagaaggaggaacttgctgaggaactggccagtagcttgtccggtaggaatgctctccaggacgagaaacggcgtctggaggcccgcatcgcacaattagaagaggaactggaggaggagcagggcaacatggaggccatgtctgacagagttaggaaggctacacagcaggcggaacaactctcgaatgagcttgcaactgaacggtcaaccgcccagaagaacgagagcgctcgacagcagctggaacgccaaaataaagagttgagaagtaagctacacgagatggaaggggccgtgaaatccaagtttaaatctacaattgcagccctggaggctaagatcgcccagctcgaggaacaggtagaacaggaggcaagggagaagcaagcggctaccaaaagcctgaagcagaaagataagaaacttaaggaaattctgttgcaagtggaggacgaacggaagatggccgagcagtataaagagcaggcagaaaagggaaacgcc

SEQ ID NO: 562 - RNA, 492 nt, synthetic construct
  misc_feature 1..492: note = Homo sapiens__P35749-1__SMMHC(1809-1972) CDS opt3
  source 1..492: mol_type = other RNA
aagagcaaattcaagtccaccatcgccgctctggaggcaaaaattgcccagctcgaggaacaagtggaacaggaggcgagagaaaagcaggctgccacaaaatctcttaagcagaaggacaaaaagctgaaagagatattgttacaagtcgaggatgaaaggaagatggcagagcagtacaaagaacaggccgagaagggcaacgctcgggttaagcagctgaaacgccaactagaggaagcagaggaagagtcacagcgaatcaatgccaaccgtagaaagctccagagggaactggacgaggctactgagagtaatgaagccatggggcgggaggtgaacgcgcttaaaagcaagctgcgcagaggaaatgaaacgtcctttgtaccctctaggcggtcgggtggccgccgagtgattgagaacgcagatgggtcagaagaggagaccgacacaagagatgccgacttcaatggaactaaagctagcgaa

SEQ ID NO: 563 - RNA, 207 nt, synthetic construct
  misc_feature 1..207: note = Homo sapiens__P35749-1__SMMHC(1809-1877) CDS opt3
  source 1..207: mol_type = other RNA
aagagcaaattcaagtccaccatcgccgctctggaggcaaaaattgcccagctcgaggaacaagtggaacaggaggcgagagaaaagcaggctgccacaaaatctcttaagcagaaggacaaaaagctgaaagagatattgttacaagtcgaggatgaaaggaagatggcagagcagtacaaagaacaggccgagaagggcaacgct

SEQ ID NO: 564 - RNA, 69 nt, synthetic construct
  misc_feature 1..69: note = Artificial____Lifeact CDS opt3
  source 1..69: mol_type = other RNA
ggcgtggccgacctgatcaagaaattcgagagcatttccaaggaagagggggatccccctgtcgctacc

SEQ ID NO: 565 - RNA, 51 nt, synthetic construct
  misc_feature 1..51: note = Saccharomyces cerevisiae S288C__NP_014882.4__Lifeact(1-17) CDS opt3
  source 1..51: mol_type = other RNA
atgggcgtggccgacctgatcaagaaattcgagagcatttccaaggaagag

SEQ ID NO: 566 - RNA, 2481 nt, synthetic construct
  misc_feature 1..2481: note = Homo sapiens__Q16665-1__HIF1alpha CDS opt3
  source 1..2481: mol_type = other RNA
atggagggcgccgggggagctaacgacaagaaaaagatcagctccgaaagaaggaaagagaagtctcgggatgcagcccgctcacgacgtagtaaagaaagcgaggtgttctacgaactggcgcaccagctcccccttcctcataatgtctcctctcacctggacaaggcttcggttatgagattgaccatttcatatttaagggtgcggaagctgctagatgccggtgacctcgatatagaggacgatatgaaagcacaaatgaactgcttttacctgaaggcccttgacggcttcgtaatggtgctgacagatgacggggatatgatctatattagcgacaatgtcaacaaatacatgggattgactcagtttgagctcacgggccatagtgtgttcgattttacccacccatgtgaccatgaagagatgcgcgaaatgctgacacacagaaatggtctggttaagaaagggaaggagcagaacactcagaggtccttctttctccggatgaagtgcaccttaacatctcgcggacgaaccatgaatatcaaaagcgctacttggaaggtgctgcactgtacaggccatattcacgtctatgacaccaactccaatcaaccgcagtgcggctacaaaaagccccctatgacgtgtcttgtgttgatctgcgagccaataccccatccttcaaacatcgaaattccactggatagtaaaactttcctaagcagacactctctcgacatgaagttttcctattgtgatgagaggatcaccgaactgatggggtacgagcccgaggaacttctgggacggtcaatttacgagtattaccacgcattggacagcgatcatctcacaaaaactcaccatgacatgttcaccaagggtcaggtaacaaccggccagtatcgtatgctggccaagcgcgggggatacgtttgggtggaaacgcaagctactgtcatctataataccaaaaacagtcagcctcagtgcatagtgtgtgtgaattacgtcgtttctggcattatccagcacgatttaatttttagcctgcaacagacagagtgcgtgctcaagccagtagaaagctcggacatgaaaatgactcagcttttcacaaaggtggagtctgaagatacctcctcactgtttgacaaattgaagaaggagccggatgccctaacgctgctcgcgcccgcagccggtgacaccatcatcagtctggacttcgggagcaacgatacagagactgacgatcaacagcttgaagaggtccctctgtataatgacgtgatgttgccatcccccaacgaaaaactccagaacattaatctggctatgtctcctttaccaaccgccgagacacccaagccgctgagaagctcagcagatcctgctctaaaccaggaagttgccctcaaactggagcccaatccagagagtcttgaattgtccttcactatgcctcaaatacaggaccagacccccagcccatctgatggatcaacaaggcagagtagccccgagcctaactccccatctgaatactgtttttacgtggactcggatatggtcaatgagttcaagctggagctcgtggaaaaactgtttgcggaggacaccgaagccaagaacccgttcagcactcaagatacggaccttgatctggagatgttggcaccctatatccctatggacgacgattttcagctccggtccttcgaccagctgtcaccattagaaagttctagcgcttcccccgagtcagccagccctcagtctacagtaaccgtttttcaacagactcagattcaggagccaaccgctaatgccacaaccactacagcaacgaccgatgaactgaagactgtgacaaaagaccgaatggaggatatcaagatactaattgcctcccccagtccgacccatatccacaaagaaacaactagcgctacctcttccccttaccgcgacacgcaatcaagaaccgcgagtccaaacagggcaggcaagggcgtcatcgagcagacagaaaaatcccacccccggtcgcctaatgtgctctccgtcgccctgtctcagcgcactaccgtgcccgaggaggaacttaacccaaagattttggctctgcaaaatgcccagagaaagaggaaaatggagcatgatgggagcctcttccaggcagttggaatcggtacactgttacagcaacctgacgatcacgccgctactacctcactgagttggaagcgtgtgaaaggctgcaagtcctctgaacagaacgggatggagcagaaaacgattatacttatccccagcgacttggcctgccggctcctgggacagtccatggatgaatcaggcctaccacaactgacaagctatgactgtgaggtaaatgcaccgattcagggtagtcgaaacctcctgcagggggaggaacttttgagagcgctggatcaggtcaattga

SEQ ID NO: 567 - RNA, 81 nt, synthetic construct
  misc_feature 1..81: note = Homo sapiens__Q16665-1__HIF1alpha(549-575) CDS opt3
  source 1..81: mol_type = other RNA
cccttcagcacccaggacacagatctggacctcgagatgcttgccccttacatcccaatggatgacgattttcaactgaga

SEQ ID NO: 568 - RNA, 45 nt, synthetic construct
  misc_feature 1..45: note = Artificial____Linker CDS opt3
  source 1..45: mol_type = other RNA
ggcgggagcggaggttccggcgggtctggaggctcaggtggggga

SEQ ID NO: 569 - RNA, 1362 nt, synthetic construct
  misc_feature 1..1362: note = Homo sapiens__Q01196-1__RUNX1(K83E_R174Q) CDS opt3
  source 1..1362: mol_type = other RNA
atgagaatccccgtggacgccagcacctccaggcggttcacacctccatctactgctctgtcaccgggcaagatgagtgaggcactcccccttggggcccctgatgcgggagctgccctggcaggtaaattgcgcagcggcgaccgatccatggtcgaagttttagccgatcacccaggggagctggtgcgtacggactctcccaactttctatgctcggtactccctacccattggagatgtaatgaaacactgccaattgctttcaaggtggtcgcacttggagatgtgcccgacggcactctggttaccgtgatggccggtaacgatgagaattactcagctgaattgaggaacgccacagcggcaatgaaaaatcaggtcgcccggtttaacgacctccgcttcgtggggagaagcggaaggggcaagagttttaccctgactataacagtattcaccaatcctccacaagttgctacgtatcaccgggccatcaaaattactgtggatggcccgcaggagccccgccgacatagacagaagctggacgatcagaccaagcctgggtccctctcttttagcgagaggttatccgaactggagcaacttcggcgtacagcaatgcgcgtctcaccacaccatcccgctcctactccaaaccccagagccagtttgaatcacagcaccgcgttcaacccgcagcctcagtctcagatgcaagacacaaggcagatccagccctccccaccttggtcatacgatcagagctatcaatacctgggaagtattgcctctccctccgtgcacccagcaacccccatcagccctggtcgggcttcgggcatgacgactctatctgccgaactctcctcacgactgagtacagctccagaccttaccgcctttagcgacccgcgccagttccccgcactgccttccatatctgatccaagaatgcattatcccggggcctttacttacagccctacaccagtgacctcaggaatcggcattggtatgagtgctatggggtccgcgacgaggtatcacacctacttgcccccgccttacccaggaagctctcaggcacaaggcggccccttccaggcctcaagtcctagctatcatctctactatggggcttccgccggatcttaccagttttcgatggtcggtggcgagcggagcccaccccgcatcctgcctccctgcacaaatgcatccactgggtcagccttactgaacccaagtctcccgaatcagtctgacgttgtggaggctgaaggaagccactccaactcacctaccaatatggcccccagcgcaagacttgaggaagcggtatggaggccatattga

SEQ ID NO: 570 - RNA, 1362 nt, synthetic construct
  misc_feature 1..1362: note = Homo sapiens__Q01196-1__RUNX1 CDS opt3
  source 1..1362: mol_type = other RNA
atgagaatccccgtggacgccagcacctccaggcggttcacacctccatctactgctctgtcaccgggcaagatgagtgaggcactcccccttggggcccctgatgcgggagctgccctggcaggtaaattgcgcagcggcgaccgatccatggtcgaagttttagccgatcacccaggggagctggtgcgtacggactctcccaactttctatgctcggtactccctacccattggagatgtaataagacactgccaattgctttcaaagtggtcgcacttggagatgtgcccgacggcactctggttaccgtgatggccggtaacgatgaaaattactcagctgagttgaggaacgccacagcggcaatgaagaatcaggtcgcccggtttaacgacctccgcttcgtggggagaagcggaaggggcaaaagttttaccctgactataacagtattcaccaatcctccacaagttgctacgtatcaccgggccatcaagattactgtggatggcccgcgcgaaccccgaagacataggcagaagctggacgatcagaccaaacctgggtccctctcttttagcgagcggttatccgagctggaacagcttcgtcgcacagcaatgagagtctcaccacaccatcccgctcctactccaaaccccagggccagtttgaatcacagcaccgcgttcaacccgcaacctcagtctcagatgcaggacacacggcaaatccagccctccccaccttggtcatacgatcagagctatcagtacctgggaagtattgcctctccctccgtgcacccagcaacccccatcagccctggtcgagcttcgggcatgacgactctatctgccgagctctcctcacgcctgagtacagctccagaccttaccgcctttagcgacccgagacaattccccgcactgccttccatatctgatccaaggatgcattatcccggggcctttacttacagccctacaccagtgacctcaggaatcggcattggtatgagtgctatggggtccgcgacgcggtatcacacctacttgcccccgccttacccaggaagctctcaggcacagggcggccccttccaagcctcaagtcctagctatcatctctactatggggcttccgccggatcttaccagttttcgatggtcggtggcgaacgcagcccacccagaatcctgcctccctgcacaaatgcatccactgggtcagccttactgaacccaagtctcccgaatcagtctgacgttgtggaggctgagggaagccactccaactcacctaccaatatggcccccagcgcaaggcttgaagaggcggtatggcgtccatattga

SEQ ID NO: 571 - RNA, 1443 nt, synthetic construct
  misc_feature 1..1443: note = Homo sapiens__Q01196-8__RUNX1 CDS opt3
  source 1..1443: mol_type = other RNA
atggccagcgactccatcttcgagtcttttccctcataccctcagtgcttcatgagagaatgtattctgggcatgaacccaagtagggatgtgcacgacgctagcacctcccggcgctttacaccgccctctactgcactctcgcctgggaagatgtcagaggcccttccactgggagcgcccgatgctggtgccgcattggccggcaaattacgaagcggggaccgtagtatggtcgaagttctggctgatcatcctggagagctagtgagaacggactccccaaatttcctctgctctgtactgcccacccactggaggtgtaacaagacacttcctatagcatttaaagtggtcgccctgggcgatgtgccagacggtactttggttaccgtgatggctgggaatgatgaaaactatagcgccgagctccggaatgcgacagcagccatgaagaaccaagtcgctcgcttcaatgacctgagatttgtgggaaggtccggccggggcaaatcattcaccctgactatcacagtatttaccaacccgccccaggttgccacgtaccatcgcgcaattaagatcactgtggatgggcctcgagagccaagaaggcaccggcagaagctcgacgatcagaccaaacccggaagtctgagcttctctgaacgtttatccgagcttgaacaattgcgcagaacagctatgagggtctcacctcatcacccagcccccactccgaatcctcgggcgagcctgaaccacagtaccgcctttaatccccagccacagtctcagatgcaagacacacgacagattcagccttccccaccctggagctatgaccagtcgtaccaatatctaggttctatcgcatccccctcagtgcatcctgctaccccaataagtccgggccgcgccagcgggatgacgactctctccgctgagctgtctagcagactttcaacagcccccgatctgaccgcattcagtgaccctaggcagtttccagccttgccctccatcagcgatcctcggatgcactacccaggagctttcacttattctcccacaccggtgacctcaggcattggtatcgggatgagtgcgatgggaagcgcaacgcgctaccatacctacctccctccaccctatcctggctcctctcaggcccaaggcgggcccttccaggcttcgagcccatcctaccacctgtattacggagcctcagcaggtagttatcagttttctatggtcggcggggagagaagccctcccaggattttaccaccgtgcacaaacgcctccactggatcagctctgctcaatcctagccttcccaaccagtctgacgttgtggaagccgagggctcccacagtaatagcccaaccaacatggcaccctctgcgcgtctggaagaggctgtatggcggccttactga

SEQ ID NO: 572 - RNA, 1419 nt, synthetic construct
  misc_feature 1..1419: note = Homo sapiens__Q01196-2__RUNX1 CDS opt3
  source 1..1419: mol_type = other RNA
atgagaatccccgtggacgccagcacctccaggcggttcacacctccatctactgctctgtcaccgggcaagatgagtgaggcactcccccttggggcccctgatgcgggagctgccctggcaggtaaattgcgcagcggcgaccgatccatggtcgaagttttagccgatcacccaggggagctggtgcgtacggactctcccaactttctatgctcggtactccctacccattggagatgtaataagacactgccaattgctttcaaagtggtcgcacttggagatgtgcccgacggcactctggttaccgtgatggccggtaacgatgaaaattactcagctgagttgaggaacgccacagcggcaatgaagaatcaggtcgcccggtttaacgacctccgcttcgtggggagaagcggaaggggcaaaagttttaccctgactataacagtattcaccaatcctccacaagttgctacgtatcaccgggccatcaagattactgtggatggcccgcgcgaaccccgaagacataggcagaagctggacgatcagaccaaacctgggtccctctcttttagcgagcggttatccgagctggaacagcttcgtcgcacagcaatgagagtctcaccacaccatcccgctcctactccaaaccccagggccagtttgaatcacagcaccgcgttcaacccgcaacctcagtctcagatgcaggacacacggcaaatccagccctccccaccttggtcatacgatcagagctatcagtacctgggaagtattgcctctccctccgtgcacccagcaacccccatcagccctggtcgagcttcgggcatgacgactctatctgccgagctctcctcacgcctgagtacagctccagaccttaccgcctttagcgacccgagacaattccccgcactgccttccatatctgatccaaggatgcattatcccggggcctttacttacagccctacaccagtgacctcaggaatcggcattggtatgagtgctatggggtccgcgacgcggtatcacacctacttgcccccgccttacccaggaagctctcaggcacagggcggccccttccaagcctcaagtcctagctatcatctctactatggggcttccgccggatcttaccagttttcgatggtcggtggcgaacgcagcccacccagaatcctgcctccctgcacaaatgcatccactgggtcagccttactgaacccaagtctcccgaatcagtctgacgttgtggaggctgagggaagccactccaactcacctaccaatatgggcggtgccagctgttctaggcaggcacgtcgggatcccgggccatgggcgcgaacaccctcctggggcagaggaaggcctactgaccgcattagtctttga

SEQ ID NO: 573 - RNA, 1419 nt, synthetic construct
  misc_feature 1..1419: note = Homo sapiens__CAA56092.1__RUNX1 CDS opt3
  source 1..1419: mol_type = other RNA
atgagaatccccgtggacgccagcacctccaggcggttcacacctccatctactgctctgtcaccgggcaagatgagtgaggcactcccccttggggcccctgatgcgggagctgccctggcaggtaaattgcgcagcggcgaccgatccatggtcgaagttttagccgatcacccaggggagctggtgcgtacggactctcccaactttctatgctcggtactccctacccattggagatgtaataagacactgccaattgctttcaaagtggtcgcacttggagatgtgcccgacggcactctggttaccgtgatggccggtaacgatgaaaattactcagctgagttgaggaacgccacagcggcaatgaagaatcaggtcgcccggtttaacgacctccgcttcgtggggagaagcggaaggggcaaaagttttaccctgactataacagtattcaccaatcctccacaagttgctacgtatcaccgggccatcaagattactgtggatggcccgcgcgaaccccgaagacataggcagaagctggacgatcagaccaaacctgggtccctctcttttagcgagcggttatccgagctggaacagcttcgtcgcacagcaatgagagtctcaccacaccatcccgctcctactccaaaccccagggccagtttgaatcacagcaccgcgttcaacccgcaacctcagtctcagatgcaggacacacggcaaatccagccctccccaccttggtcatacgatcagagctatcagtacctgggaagtattgcctctccctccgtgcacccagcaacccccatcagccctggtcgagcttcgggcatgacgactctatctgccgagctctcctcacgcctgagtacagctccagaccttaccgcctttagcgacccgagacaattccccgcactgccttccatatctgatccaaggatgcattatcccggggcctttacttacagccctacaccagtgacctcaggaatcggcattggtatgagtgctatggggtccgcgacgcggtatcacacctacttgcccccgccttacccaggaagctctcaggcacagggcggccccttccaagcctcaagtcctagctatcatctctactatggggcttccgccggatcttaccagttttcgatggtcggtggcgaacgcagcccacccagaatcctgcctccctgcacaaatgcatccactgggtcagccttactgaacccaagtctcccgaatcagtctgacgttgtggaggctgagggaaggcaccgtaacagccctaccaatatgggcggtgcctcctgttcacggcaggcacgaagagatcccgggccatgggcgaggacacccagctggggccgcggacggcctactgacagaatttctctttga

SEQ ID NO: 574 - RNA, 1407 nt, synthetic construct
  misc_feature 1..1407: note = Homo sapiens__Q01196-10__RUNX1 CDS opt3
  source 1..1407: mol_type = other RNA
atgcccgccgctcctagaggcccagcacagggggaggccgcggctaggacccggagccgcgacgcctccacatctcgacgtttcactccgccctcaacggcactgagtcctggaaagatgagcgaagccctcccacttggtgctcccgatgcaggcgccgctctggccgggaaattgagatccggagacaggtctatggtggaggtcttagcggatcaccctggcgaactggttcggaccgactcgccaaactttctatgctcagtgctccccacacattggcgctgtaataagactctgcctatcgcattcaaagtagtggcccttggtgatgtcccagacgggaccctggtgacagttatggctggaaacgatgagaattacagcgccgaattgagaaacgcaaccgctgccatgaagaatcaagtggcgaggtttaacgacctccggttcgtcggccgcagtggccgagggaaatcctttactctgacaattaccgtgttcacgaatccgccccaggtagccacttatcacagagcaataaagatcaccgttgatggacctagggagccacggcgtcatcgccagaagctggacgatcagacaaaacccggttctctcagcttttccgagagattatcagaactggagcaacttaggcggactgctatgcgagtgagtcctcaccatccagcccccaccccgaaccctcgcgctagcttgaatcactctacagccttcaacccccagccacagtcccagatgcaagacaccagacagattcagccttcacccccatggagctacgatcagagttatcaatacctgggctctatcgcatcccccagcgtccaccctgccacgccaatttcgccggggagggcttctggaatgactacactatccgcggaactctcaagtcggctgagcaccgcacccgaccttactgccttttccgaccctcgccagttcccagctctgccctctatcagcgatcctagaatgcattatccaggcgcctttacatactcacccaccccggtgacgagtggtatagggatcggaatgtccgcaatgggcagcgccaccaggtatcacacatacttgcctccaccctaccctgggtcttcacaggctcaagggggacccttccaggccagtagcccatcctatcatctctactatggtgcatctgcgggctcgtaccagtttagcatggtgggcggagagcgttcccctccccggattctgccaccgtgcactaatgcttcaaccggcagtgccttactgaacccttctctccccaatcagagcgacgtcgttgaggcagaaggttcccactcaaacagcccaacaaatatggccccctctgctcgacttgaggaagccgtgtggagaccttattga

SEQ ID NO: 575 - RNA, 1371 nt, synthetic construct
  misc_feature 1..1371: note = Homo sapiens__Q01196-9__RUNX1 CDS opt3
  source 1..1371: mol_type = other RNA
atgaaccccagcagagacgtgcacgatgcctccacctctaggcggttcacacctccatcaactgctctgagtccgggcaagatgagcgaggcactcccccttggggcccctgacgcgggagctgccctggcaggtaaattgcgctccggcgatcgatctatggtcgaagttttagccgaccatccaggggagctggtgcgtacggattcgcccaattttctatgctcagtactccctacccactggagatgtaacaagacactgccaatcgctttcaaagtggtcgcacttggagacgtgcccgatggcactctggttaccgtgatggccggtaatgacgaaaactacagcgctgagttgaggaatgccacagcggcaatgaagaaccaggtcgcccggtttaatgatctccgcttcgtggggagaagtggaaggggcaaatcctttaccctgactattacagtattcaccaaccctccacaagttgctacgtatcatcgggccataaagatcactgtggacggcccgcgcgaaccccgaagacacaggcagaagctggatgaccagaccaaacctgggtctctcagcttttccgagcggttatcagagctggaacagcttcgtcgcacagcaatgagagtcagtccacatcaccccgctcctactccaaatcccagggccagcttgaaccactctaccgcgttcaatccgcaacctcagtcccagatgcaggatacacggcaaattcagccctcaccaccttggagctacgaccagagttatcagtacctgggatctatcgcctcccccagcgtgcatccagcaacccccatttcgcctggtcgagcttctggcatgacgactctatccgccgagctctcaagtcgcctgagcacagctccagaccttaccgccttttccgatccgagacaattccccgcactgccttctatcagcgacccaaggatgcactatcccggggcctttacttactcacctacaccagtgaccagtggaataggcatcggtatgtccgctatggggagcgcgacgcggtatcatacctacttgcccccgccttacccaggatcttcacaggcacagggcggccccttccaagccagtagcccttcctatcacctctactatggggcttctgccggatcgtaccagtttagcatggtcggtggcgaacgctcacccccaaggattctgcctccctgcacaaacgcatccactgggagtgccttactgaatccatctctcccgaaccagagcgatgttgtggaggctgagggatcccactcaaatagccctaccaacatggccccctctgcaagacttgaagaggcggtatggcgtccatattga

SEQ ID NO: 576 - RNA, 1362 nt, synthetic construct
  misc_feature 1..1362: note = Homo sapiens__AAA51720.1__RUNX1 CDS opt3
  source 1..1362: mol_type = other RNA
atgagaatccccgtggacgccagcacctccaggcggttcacacctccatctactgctctgtcaccgggcaagatgagtgaggcactcccccttggggcccctgatgcgggagctgccctggcaggtaaattgcgcagcggcgaccgatccatggtcgaagttttagccgatcacccaggggagctggtgcgtacggactctcccaactttctatgctcggtactccctacccattggagatgtaataagacactgccaattgctttcaaagtggtcgcacttggagatgtgcccgacggcactctggttaccgtgatggccggtaacgatgaaaattactcagctgagttgaggaacgccacagcggcaatgaagaatcaggtcgcccggtttaacgacctccgcttcgtggggagaagcggaaggggcaaaagttttaccctgactataacagtattcaccaatcctccacaagttgctacgtatcaccgggccatcaagattactgtggatggcccgcgcgaaccccgaagacataggcagaagctggacgatcagaccaaacctgggtccctctcttttagcgagcggttatccgagctggaacagcttcgtcgcacagcaatgagagtctcaccacaccatcccgctcctactccaaaccccagggccagtttgaatcacagcaccgcgttcaacccgcaacctcagtctcagatgcaggacacacggcaaatccagccctccccaccttggtcatacgatcagagctatcagtacctgggaagtattgcctctccctccgtgcacccagcaacccccatcagccctggtcgagcttcgggcatgacgactctatctgccgagctctcctcacgcctgagtacagctccagaccttaccgcctttagcgacccgagacaattccccgcactgccttccatatctgatccaaggatgcattatcccggggcctttacttacagccctacaccagtgacctcaggaatcggcattggtatgagtgctatggggtccgcgacgcggtatcacacctacttgcccccgccttacccaggaagctctcaggcacagggcggccccttccaagcctcaagtcctagctatcatctctactatggggcttccgccggatcttaccagttttcgatggtcggtggcgaacgcagcccacccagaatcctgcctccctgcacaaatgcatccactgggttcgccttactgaacccatcactcccgaatcagagtgacgttgtggaggctgagggatctcacagcaactcccctaccaatatggccccctcagcaaggcttgaagaggcggtatggcgtccatattga

SEQ ID NO: 577 - RNA, 1170 nt, synthetic construct
  misc_feature 1..1170: note = Homo sapiens__H9KVB1__RUNX1 CDS opt3
  source 1..1170: mol_type = other RNA
atgagaatccccgtggacgccagcacctccaggcggttcacacctccatctactgctctgtcaccgggcaagatgagtgaggcactcccccttggggcccctgatgcgggagctgccctggcaggtaaattgcgcagcggcgaccgatccatggtcgaagttttagccgatcacccaggggagctggtgcgtacggactctcccaactttctatgctcggtactccctacccattggagatgtaataagacactgccaattgctttcaaagtggtcgcacttggagatgtgcccgacggcactctggttaccgtgatggccggtaacgatgaaaattactcagctgagttgaggaacgccacagcggcaatgaagaatcaggtcgcccggtttaacgacctccgcttcgtggggagaagcggaaggggcaaaagttttaccctgactataacagtattcaccaatcctccacaagttgctacgtatcaccgggccatcaagattactgtggatggcccgcgcgaaccccgaaacaccagacagatccagccttccccaccctggtcttacgaccagagctatcaatacctggggtccattgcatcacctagtgtccatccagctacacccatcagcccgggaagggcctctggtatgactaccctctccgcggagttatcaagccggctgagtacagcccctgatcttaccgcattttctgacccccgtcagttcccagctttgccttccataagcgatccccgcatgcactatccaggcgcctttacgtactcgcccactcctgtgacatctgggatcggaattggcatgtccgctatgggttcagccaccagatatcatacttacctgccaccgccctaccctgggagtagccaggcacagggaggcccattccaagcctcctctcccagctatcacctatactatggcgcttcagcggggagttaccagttttccatggtgggaggtgagaggagccctccacggatcctgcccccgtgcacaaatgcatctaccggctcagccctccttaaccctagtctgccaaatcagagcgacgtcgttgaagctgaggggtcccactctaactcgcccacgaatatggcccctagcgcacgattggaagaggccgtgtggcgcccctattga

SEQ ID NO: 578 - RNA, 1047 nt, synthetic construct
  misc_feature 1..1047: note = Homo sapiens__Q01196-11__RUNX1 CDS opt3
  source 1..1047: mol_type = other RNA
atggccggcaacgacgagaattacagcgctgaactgagaaacgcaaccgccgcgatgaagaatcaggtggctaggttcaacgatctccggtttgtcgggcgctccggacgaggtaaatctttcacacttactatcacggtttttaccaatccccctcaagtggccacatatcaccgtgcaattaagataactgtagacggcccaagagagccgaggcggcatcgccagaaactggatgaccagaccaagcccgggtcattgagtttcagcgaaagattatccgagctggaacagctaaggcggacagccatgcgcgtgtctcctcaccatccagctcccacccctaacccacgagcatcgctcaatcactcaactgcctttaacccccaacctcagagccagatgcaggatacaagacaaatccagccaagtccgccctggtcctacgaccagtcttatcagtacctgggaagcattgcttccccttcagtccatccagccacccccatcagtcctggcagggcgagcggtatgacgactctttctgcagagctgtcctcacggttgagcaccgccccagatctcacagctttcagtgacccccgtcaatttccggccctgccttctatttccgatccccgcatgcactatccaggggcattcacttacagccctacccccgtgacatcgggaatcggcataggcatgtctgctatggggtccgccaccagatatcacacgtacctgccacccccttacccaggatcaagtcaggcgcagggtggcccgtttcaagccagctccccctcttatcatctctactatggggcaagcgctggatcataccagttcagtatggttggcggtgagaggtcccctccacggatcttacccccttgcactaatgccagcacagggtctgctctgcttaacccatcattgcccaatcagagtgacgtggtcgaagccgagggaagccactccaactctccgaccaatatggcaccttcggcccgactggaagaggctgtgtggcgcccatattga

SEQ ID NO: 579 - RNA, 774 nt, synthetic construct
  misc_feature 1..774: note = Homo sapiens__Q01196-4__RUNX1 CDS opt3
  source 1..774: mol_type = other RNA
atgagaatccccgtggacgccagcacctccaggcggttcacacctccatctactgctctgtcaccgggcaagatgagtgaggcactcccccttggggcccctgatgcgggagctgccctggcaggtaaattgcgcagcggcgaccgatccatggtcgaagttttagccgatcacccaggggagctggtgcgtacggactctcccaactttctatgctcggtactccctacccattggagatgtaataagacactgccaattgctttcaaagtggtcgcacttggagatgtgcccgacggcactctggttaccgtgatggccggtaacgatgaaaattactcagctgagttgaggaacgccacagcggcaatgaagaatcaggtcgcccggtttaacgacctccgcttcgtggggagaagcggaaggggcaaaagttttaccctgactataacagtattcaccaatcctccacaagttgctacgtatcaccgggccatcaagattactgtggatggcccgcgcgaaccccgaagacataggcagaagctggacgatcagaccaaacctgggtccctctcttttagcgagcggttatccgagctggaacagcttcgtcgcacagcaatgagagtctcaccacaccatcccgctcctactccaaaccccagggccagtttgaatcacagcaccgcgttcaacccgcaacctcagtctcagatgcaggacacacggcaaatccagccctccccaccttggtcatacgatcagagctga

SEQ ID NO: 580 - RNA, 771 nt, synthetic construct
  misc_feature 1..771: note = Homo sapiens__A8MZI9__RUNX1 CDS opt3
  source 1..771: mol_type = other RNA
atgcccgccgctcctagaggcccagcacagggggaggccgcggctaggacccggagccgcgacgcctccacatctcgacgtttcactccgccctcaacggcactgagtcctggaaagatgagcgaagccctcccacttggtgctcccgatgcaggcgccgctctggccgggaaattgagatccggagacaggtctatggtggaggtcttagcggatcaccctggcgaactggttcggaccgactcgccaaactttctatgctcagtgctccccacacattggcgctgtaataagactctgcctatcgcattcaaagtagtggcccttggtgatgtcccagacgggaccctggtgacagttatggctggaaacgatgagaattacagcgccgaattgagaaacgcaaccgctgccatgaagaatcaagtggcgaggtttaacgacctccggttcgtcggccgcagtggccgagggaaatcctttactctgacaattaccgtgttcacgaatccgccccaggtagccacttatcacagagcaataaagatcaccgttgatggacctagggagccacggcgtcatcgccagaagctggacgatcagacaaaacccggttctctcagcttttccgagagattatcagaactggagcaacttaggcggactgctatgcgagtgagtcctcaccatccagcccccaccccgaaccctcgcgctagcttgaatcactctacagccttcaacccccagccacagtcccagatgcaatga

SEQ ID NO: 581 - RNA, 753 nt, synthetic construct
  misc_feature 1..753: note = Homo sapiens__Q01196-3__RUNX1 CDS opt3
  source 1..753: mol_type = other RNA
atgagaatccccgtggacgccagcacctccaggcggttcacacctccatctactgctctgtcaccgggcaagatgagtgaggcactcccccttggggcccctgatgcgggagctgccctggcaggtaaattgcgcagcggcgaccgatccatggtcgaagttttagccgatcacccaggggagctggtgcgtacggactctcccaactttctatgctcggtactccctacccattggagatgtaataagacactgccaattgctttcaaagtggtcgcacttggagatgtgcccgacggcactctggttaccgtgatggccggtaacgatgaaaattactcagctgagttgaggaacgccacagcggcaatgaagaatcaggtcgcccggtttaacgacctccgcttcgtggggagaagcggaaggggcaaaagttttaccctgactataacagtattcaccaatcctccacaagttgctacgtatcaccgggccatcaagattactgtggatggcccgcgcgaaccccgaagacataggcagaagctggacgatcagaccaaacctgggtccctctcttttagcgagcggttatccgagctggaacagcttcgtcgcacagcaatgagagtctcaccacaccatcccgctcctactccaaaccccagggccagtttgaatcacagcaccgcgttcaacccgcaacctcagtctcagatgcaggaggaagacacagccccctggcggtgctga

SEQ ID NO: 582 - RNA, 729 nt, synthetic construct
  misc_feature 1..729: note = Homo sapiens__Q01196-7__RUNX1 CDS opt3
  source 1..729: mol_type = other RNA
atgagaatccccgtggacgccagcacctccaggcggttcacacctccatctactgctctgtcaccgggcaagatgagtgaggcactcccccttggggcccctgatgcgggagctgccctggcaggtaaattgcgcagcggcgaccgatccatggtcgaagttttagccgatcacccaggggagctggtgcgtacggactctcccaactttctatgctcggtactccctacccattggagatgtaataagacactgccaattgctttcaaagtggtcgcacttggagatgtgcccgacggcactctggttaccgtgatggccggtaacgatgaaaattactcagctgagttgaggaacgccacagcggcaatgaagaatcaggtcgcccggtttaacgacctccgcttcgtggatgggcctagagaaccaaggcggcaccgccaaaaactggacgatcagaccaagccgggaagcctgagtttttccgagcgactctctgagttagaacagctgagaaggactgctatgcgggtaagcccccatcaccctgccccaacacccaatcctcgtgcatcccttaaccattcaaccgctttcaatccacagccccaaagtcagatgcaggacacgcgccagatacaaccgagccctccctggtcttatgatcagtcctaccagtatttgggctcaatcgccagcccaagtgttcaccctgcgactcccatttga

SEQ ID NO: 583 - RNA, 675 nt, synthetic construct
  misc_feature 1..675: note = Homo sapiens__Q01196-5__RUNX1 CDS opt3
  source 1..675: mol_type = other RNA
atgagaatccccgtggacgccagcacctccaggcggttcacacctccatctactgctctgtcaccgggcaagatgagtgaggcactcccccttggggcccctgatgcgggagctgccctggcaggtaaattgcgcagcggcgaccgatccatggtcgaagttttagccgatcacccaggggagctggtgcgtacggactctcccaactttctatgctcggtactccctacccattggagatgtaataagacactgccaattgctttcaaagtggtcgcacttggagatgtgcccgacggcactctggttaccgtgatggccggtaacgatgaaaattactcagctgagttgaggaacgccacagcggcaatgaagaatcaggtcgcccggtttaacgacctccgcttcgtggggagaagcggaaggggcaaaagttttaccctgactataacagtattcaccaatcctccacaagttgctacgtatcaccgggccatcaagattactgtggatggcccgcgcgaaccccgatccaagtgcatccatctggggctcgtccaccctccaggatggtacaccttacaggcaggtattctgagagaccatgtgtctgatagccttggctccacatttccccctgggggatggcaggctccagtgaaacccaagtcatga

SEQ ID NO: 584 - RNA, 567 nt, synthetic construct
  misc_feature 1..567: note = Homo sapiens__Q01196-6__RUNX1 CDS opt3
  source 1..567: mol_type = other RNA
atgagaatccccgtggacgccagcacctccaggcggttcacacctccatctactgctctgtcaccgggcaagatgagtgaggcactcccccttggggcccctgatgcgggagctgccctggcaggtaaattgcgcagcggcgaccgatccatggtcgaagttttagccgatcacccaggggagctggtgcgtacggactctcccaactttctatgctcggtactccctacccattggagatgtaataagacactgccaattgctttcaaagtggtcgcacttggagatgtgcccgacggcactctggttaccgtgatggccggtaacgatgaaaattactcagctgagttgaggaacgccacagcggcaatgaagaatcaggtcgcccggtttaacgacctccgcttcgtggggagaagcggaaggggcaaaagttttaccctgactataacagtattcaccaatcctccacaagttgctacgtatcaccgggccatcaagattactgtggatggcccgcgcgaaccccgaaactccctgacctggcctagatacccacatatctga

SEQ ID NO: 585 - RNA, 384 nt, synthetic construct
  misc_feature 1..384: note = Homo sapiens__Q01196-1__RUNX1(1-128) CDS opt3
  source 1..384: mol_type = other RNA
atgagaatccccgtggacgccagcacctccaggcggttcacacctccatctactgctctgtcaccgggcaagatgagtgaggcactcccccttggggcccctgatgcgggagctgccctggcaggtaaattgcgcagcggcgaccgatccatggtcgaagttttagccgatcacccaggggagctggtgcgtacggactctcccaactttctatgctcggtactccctacccattggagatgtaataagacactgccaattgctttcaaagtggtcgcacttggagatgtgcccgacggcactctggttaccgtgatggccggtaacgatgaaaattactcagctgagttgaggaacgccacagcggcaatgaagaatcaggtc

SEQ ID NO: 586 - RNA, 531 nt, synthetic construct
  misc_feature 1..531: note = Homo sapiens__Q01196-1__RUNX1(1-177) CDS opt3
  source 1..531: mol_type = other RNA
atgagaatccccgtggacgccagcacctccaggcggttcacacctccatctactgctctgtcaccgggcaagatgagtgaggcactcccccttggggcccctgatgcgggagctgccctggcaggtaaattgcgcagcggcgaccgatccatggtcgaagttttagccgatcacccaggggagctggtgcgtacggactctcccaactttctatgctcggtactccctacccattggagatgtaataagacactgccaattgctttcaaagtggtcgcacttggagatgtgcccgacggcactctggttaccgtgatggccggtaacgatgaaaattactcagctgagttgaggaacgccacagcggcaatgaagaatcaggtcgcccggtttaacgacctccgcttcgtggggagaagcggaaggggcaaaagttttaccctgactataacagtattcaccaatcctccacaagttgctacgtatcaccgggccatcaagattactgtggatggcccgcgcgaaccccga

SEQ ID NO: 587 - RNA, 723 nt, synthetic construct
  misc_feature 1..723: note = Homo sapiens__Q01196-1__RUNX1(1-241) CDS opt3
  source 1..723: mol_type = other RNA
atgagaatccccgtggacgccagcacctccaggcggttcacacctccatctactgctctgtcaccgggcaagatgagtgaggcactcccccttggggcccctgatgcgggagctgccctggcaggtaaattgcgcagcggcgaccgatccatggtcgaagttttagccgatcacccaggggagctggtgcgtacggactctcccaactttctatgctcggtactccctacccattggagatgtaataagacactgccaattgctttcaaagtggtcgcacttggagatgtgcccgacggcactctggttaccgtgatggccggtaacgatgaaaattactcagctgagttgaggaacgccacagcggcaatgaagaatcaggtcgcccggtttaacgacctccgcttcgtggggagaagcggaaggggcaaaagttttaccctgactataacagtattcaccaatcctccacaagttgctacgtatcaccgggccatcaagattactgtggatggcccgcgcgaaccccgaagacataggcagaagctggacgatcagaccaaacctgggtccctctcttttagcgagcggttatccgagctggaacagcttcgtcgcacagcaatgagagtctcaccacaccatcccgctcctactccaaaccccagggccagtttgaatcacagcaccgcgttcaacccgcaacctcagtctcagatgcag

SEQ ID NO: 588 - RNA, 1815 nt, synthetic construct
  misc_feature 1..1815: note = Homo sapiens__Q06455-1__RUNX1T1a CDS opt3
  source 1..1815: mol_type = other RNA
atgatcagcgtgaagagaaacacctggagggccctgtccctcgtcattggcgactgccggaaaaaggggaatttcgagtactgtcaggatcgcacagaaaaacactctactatgcccgactcacctgttgatgtgaagacgcaaagtcgacttaccccaccgacaatgccccctccacccactacccagggagctcctcgtacaagctcctttaccccaactacactgaccaacggtacgtctcattcgcccactgcattgaatggcgccccttcaccaccgaacgggttcagcaatggacccagttcctctagctcctcaagtttagcgaaccagcagctgcctccagcttgcggcgccagacaactaagcaaactcaagaggtttctgaccacacttcagcagttcggtaatgacatatctcccgagatcggggaacgggtacgcactctggtgttgggactcgtcaactccaccctgacaattgaggaatttcactcaaagctgcaggaggcaaccaatttccctctcagaccatttgtgatccccttcttaaaagccaacctgccgcttttgcaaagggagctgctacattgtgctcggctcgcaaagcagaatcctgcccagtatctggctcagcacgaacaacttctgttggatgccagcacgacttcgcccgttgactcttccgagctcctgttagatgtgaacgaaaatggcaaacgccgaacaccagacagaaccaaggagaacggctttgatagggagcctctgcatagcgaacacccctcgaaacggccatgcactatttctcccgggcagcgttactcccctaataacggactctcatatcagccaaacggtcttccgcaccccacacctccaccccctcaacattaccgcctggacgatatggcgatcgcacaccattatagagacagttacaggcacccaagccaccgggatttgcgagaccgcaatagacccatgggcctacatgggaccaggcaggaggaaatgatagaccaccggctgacggatcgcgagtgggccgaagagtggaagcatctcgaccatctgcttaactgtatcatggatatggtcgagaagaccagaaggtccctgacagtgttgcgtcggtgccaggaagctgaccgagaggaactcaattattggattagaaggtactctgatgccgaggacctgaaaaagggaggcggtagctcaagttcccacagccgccagcaatctccggtaaaccctgatccagttgcattagacgctcaccgggagttcctgcacagacccgcctcagggtacgtgcctgaagagatctggaaaaaggcggaagaggccgtcaatgaagtgaaaaggcaggcaatgactgagctacagaaggctgtgagtgaagccgagcgcaaagctcatgatatgattaccacagagcgagccaagatggaacggactgtcgcagaggccaagcgtcaggctgcggaagacgcactcgccgttatcaaccaacaggaggatagctccgagtcttgttggaattgcggaagaaaagctagtgaaacctgtagcggctgcaacacagccaggtattgtggctccttttgccagcacaaggactgggagaaacatcaccacatatgcgggcagaccctgcaagcacagcagcagggagacactcccgccgtgtcaagttctgtaacgccaaatagcggtgctggctcccctatggatacacccccagccgcaaccccgcgctcaactacccctgggacacccagcaccattgaaactacaccacggtga

SEQ ID NO: 589 - RNA, 1992 nt, synthetic construct
  misc_feature 1..1992: note = Homo sapiens__A0A0A0MSU1__RUNX1T1a CDS opt3
  source 1..1992: mol_type = other RNA
atgtgccaccccgacaaggccttcaccagcgataaactgcagtgtgtgtttaacgagtacaaggctgcagtctgggttcctccaagaccgaggcccctctcccgggcccctcttccagaagcgggcggggagaatctgcatttgaaaatctctcgcgtgcgaaagcgtaacttacccttcgtagtgtggggagaagaggaagctagcacacctggtctggacgccattagtcaccatctatgctatccagatagaactcacagggaccggacggagaaacatagcaccatgcccgattcccctgtcgacgtgaagacacaatctcgcctcactccaccgaccatgccccctccacccacaacccagggcgcacctagaacttcgtcatttacaccaaccacgctgactaatgggaccagccacagtcccacagcccttaacggagctccgtcccctcccaatggcttctctaacggtccaagctcctcaagttcatcttccctggcaaatcagcagttgcctcccgcctgtggggctaggcaactctcaaagctgaaacggtttctgactaccctccagcagttcggaaacgatataagcccagagatcggcgaacgcgttcgaacattagtgctgggccttgtcaatagtaccttgacgattgaggaatttcactctaagctgcaggaggccactaacttccccctaagaccttttgtgatcccattcctcaaagcgaatctgccgcttctgcaaagggagttgctccattgcgcacggctggccaagcagaaccccgctcagtacttagcccagcacgaacaactgctccttgacgcatccacaaccagccctgtagattcgtctgagctgttgctagacgttaatgaaaacgggaaacgtcgcactccagatagaacaaaggagaatggatttgacagggaacccctgcattccgagcacccttcaaagcggccatgtaccattagtcccggtcagcgatatagcccgaacaacggcctctcctaccagcctaatgggctgccacaccccacgcctcccccacctcaacattatcgccttgatgacatggctatcgcccaccattacagagactcttataggcaccccagccatcgggatctgcgcgacagaaacaggccaatgggattgcacggcacccgtcaggaggaaatgatagatcaccggctcacagaccgagagtgggcggaagagtggaaacatctggatcacttactgaattgcatcatggacatggtggaaaagactagaaggtcactaaccgtcctccgccggtgtcaggaggccgatagagaggaactgaactactggattaggcgctacagtgacgcagaggatcttaaaaagggtgggggatcctctagctcacatagtcgacagcaaagcccggtgaatcctgaccccgtggctttggatgcccaccgggagttcctgcaccgtccagcttccggctatgtccccgaagaaatctggaaaaaggccgaggaggcagttaacgaagtgaaaagacaggccatgacagagctccagaaggctgtatctgaagcggagaggaaggcacatgacatgattactaccgagcgcgccaaaatggaacggacagtggctgaggccaagagacaggcagccgaagacgctctggccgtcatcaatcaacaggaggattcgagcgaatcctgctggaactgtggcaggaaagcatcagagacctgcagtgggtgtaatactgcgcgatactgcggatctttttgccagcacaaggactgggagaaacatcaccatatatgtggtcagacgcttcaagctcagcagcagggcgatacccctgccgtgagctcctcagttacaccaaacagcggggcaggatctcccatggacactcctccggccgctaccccacgctccacaacccccggcactcctagtacaattgaaacgaccccacggtga

SEQ ID NO: 590 - RNA, 1848 nt, synthetic construct
  misc_feature 1..1848: note = Homo sapiens__Q06455-3__RUNX1T1a CDS opt3
  source 1..1848: mol_type = other RNA
atgtgccaccccgacaaggccttcaccagcgataaactgcagtgtgtgtttaacgagtacaaggctgcagtctgggttcctccaagaccgaggcccctctcccgggcccctcttccagaagaccgcacagagaaacattctactatgcccgattcacctgtggacgtaaagacgcaaagtcgactgaccccacccacaatgcctccaccgcccactacccagggcgcgcctcgtacaagctccttcaccccaactacattgaccaatgggacgtctcactcgcccactgctttaaacggagccccttcaccacccaatggttttagcaacggcccgagttcctctagctcctcaagtctggcaaatcagcagctacctcccgcctgcggggctagacaactcagcaaactgaagaggttccttaccacactgcagcagtttggaaacgatatctctccagaaattggcgagcgggtgcgcactttggtcctcggtctggttaattccaccctgacaatagaagagttccattcaaagctccaggaggcaaccaactttcctttaagacccttcgtgatcccatttctgaaagccaatcttcccttgctgcaaagggaactactccactgtgctcggctggccaagcagaaccctgcgcagtatcttgcacagcatgagcaactgttgctcgacgccagcacgaccagtccagtggattcttccgaactgttactggacgtcaatgagaacgggaaacgccgaacaccggatagaaccaaggagaatggattcgacagggaacccctccacagcgagcacccttcgaaacggccatgcactatttctcccggccagcgttactcccctaacaatggcctttcatatcagccaaacgggctgccccatccgacacctccaccccctcaacactaccgcttggatgacatggctatcgcccatcactatagagatagttacaggcaccccagccatcgggacctacgagaccgcaacagaccaatgggactgcacggtaccaggcaggaagagatgattgatcatcggctcacggaccgcgaatgggcagaggagtggaagcacctggatcatcttctgaattgtatcatggacatggtggaaaagaccagaaggtccttgacagtactccgtcggtgccaggaggctgatcgagaagagttaaactattggataagaaggtactctgacgccgaagatctgaaaaagggcgggggaagctcaagttcccacagccgccagcaatctcctgttaatcccgacccagtggcgctggatgcccaccgggagtttctacatagaccggcatcaggctacgtccctgaggaaatctggaaaaaggctgaggaagccgtgaacgaggtgaaaaggcaggctatgactgaactccagaaggccgtcagtgaggcagagcgcaaagcccacgacatgattaccacagaacgagctaagatggagcggactgttgcggaagcaaagcgtcaggccgctgaggatgccctggcagtgatcaatcaacaggaggacagctccgaatcttgttggaactgcggtagaaaagcctcggagacctgtagcgggtgcaatacagctaggtattgtggatccttctgccagcataaggactgggaaaaacaccaccatatttgcggccagacccttcaagcccagcagcagggcgatactcccgcagtatcaagttctgtgacgccaaacagcggggcgggatcccccatggacacacctccagctgccactccccgctcaactacccctggtacaccgagcaccatcgagactacaccacggtga

SEQ ID NO: 591 - RNA, 1755 nt, synthetic construct
  misc_feature 1..1755: note = Homo sapiens__A0A087WWT6__RUNX1T1a CDS opt3
  source 1..1755: mol_type = other RNA
atggtgggcctgagcgggcccgtccagtacagaaccgagaagcactccacaatgcctgactctccagttgatgtgaaaactcaatcaaggctcacgccgcccaccatgcctccaccccctacaactcagggagccccacggaccagtagcttcacacccaccactcttacaaacggtacctcccattctcctacggctctgaatggcgcaccatcgccgcccaacgggttttcaaatggacctagcagttcctctagctcctcattggccaaccagcagttaccacccgcgtgcggcgctcgccaactgagtaagctaaaacgattcctcactaccctgcagcagtttggtaatgacatcagccctgaaattggggagcgtgtaagaacacttgtgctgggattggtcaactctactctcaccatagaagagttccactccaagctgcaggaagccacaaattttccactgaggcccttcgtgatcccgtttctcaaagcaaacttacctctgcttcaacgggagttgctgcattgtgcccgcctagctaagcagaatcccgcacagtatctcgcccagcacgagcaactgcttctggatgcttcaaccacgagcccagttgacagttctgaattgctcctggatgtgaacgagaatggcaagagaaggactcctgaccggacaaaagaaaacggcttcgatcgcgagcccttacattccgagcacccaagcaagcgaccctgcaccatttcgcctgggcagagatactctccaaataacggactgtcctatcagccgaatggtctcccccaccctactccaccccctccacaacattacaggcttgacgatatggccatcgcgcaccattatcgggactcataccgtcaccccagtcaccgcgatctgagagacaggaaccggccgatgggcttgcatgggacacgacaggaagagatgattgatcaccgcctaaccgacagagaatgggcagaggaatggaaacatctggaccacctcctgaactgtatcatggatatggtcgagaagacgaggcggagccttaccgtgctgcgcagatgccaggaggccgacagggaagagttgaattattggatacgtcggtactccgatgctgaagacctcaaaaagggaggcggttctagctcaagtcattcccgacagcaaagccctgtaaacccagatcccgttgccctggacgcacacagagagtttttacacaggcctgcttctgggtacgtgcccgaagagatctggaagaaagccgaggaagcggtcaatgaggtgaagcgccaggccatgacagaactgcagaaagcagtgtcagaggctgaacggaaggcccatgatatgattactaccgagagagctaaaatggagaggacagtcgccgaagcaaagcgccaggccgctgaggacgcgctagcagttatcaaccaacaggaagatagtagcgagtcctgttggaattgcggacgaaaagcctctgagacttgttcgggctgcaacaccgctcggtattgtggcagcttctgccagcacaaggactgggaaaagcatcaccacatttgtgggcagacactccaagcccagcagcagggagataccccagcagtgtcctcaagtgtaactcctaattctggtgccggcagccccatggacacgccaccggctgccacacctcgttccaccactcccgggaccccatcaacaatcgagaccactcccagatga

SEQ ID NO: 592 - RNA, 1734 nt, synthetic construct
  misc_feature 1..1734: note = Homo sapiens__Q06455-2__RUNX1T1a CDS opt3
  source 1..1734: mol_type = other RNA
atgcccgacagaaccgagaagcacagcacaatgcctgattccccagtggacgtcaaaactcagtctaggctgacgccgcccaccatgcctccaccccctacaactcaaggcgccccacggacctcaagtttcacacccaccactctcacaaacgggaccagccattcccctacggctcttaatggagcaccatctccgcccaacggtttttcgaatggcccttcaagcagttcctctagctccctggccaaccagcagttgccacccgcgtgcggggctcgccagttatcaaagctgaaacgattcctaactaccctccaacagtttggaaatgatatcagtcctgaaattggcgagcgtgttagaacactggtgcttggtctggtaaacagcactttgaccatagaagagttccactctaagctccaggaagccacaaattttccactgaggcccttcgtgatcccgtttctgaaagcaaacctccctttactgcagcgggagcttttgcattgtgcccgcctggctaagcaaaatcccgcacagtacctagcccagcacgagcagctcctgcttgacgcttccaccacgtcaccagtcgatagcagtgaactgttgctcgacgtgaacgagaatgggaagagaaggactcctgatcggacaaaagaaaacggattcgaccgcgagcccctgcattctgagcacccatccaagcgaccctgcaccattagccctggccaaagatattcgccaaataacggcttatcttaccagccgaatgggctgccccaccctactccaccccctccacagcattataggctcgatgacatggccatcgcgcaccattaccgggattcctatcgtcacccctcacaccgcgaccttagagataggaaccggccgatgggactgcatggtacacgacaagaagagatgattgaccaccgcttgaccgacagagaatgggcagaggaatggaaacatctagatcatctgctcaactgtatcatggacatggttgagaagacgaggcggagtctgaccgtgcttcgcagatgccaggaggccgatagggaggaactgaattactggatacgtcggtatagcgacgctgaagatttgaaaaagggcgggggatcctctagctcacacagtcgacagcagtcccctgtcaacccagaccccgtggccctcgatgcacacagagagtttctgcacaggcctgctagcggctacgtacccgaagagatctggaagaaagccgaggaagcggttaatgaggtgaagcgccaagccatgacagaattacagaaagcagtctctgaggctgaacggaaggcccatgacatgattactaccgagagagctaaaatggagaggacagtggccgaagcaaagcgccaggccgctgaggatgcgctggcagtgatcaaccagcaagaagactcaagtgagagctgttggaattgcggtcgaaaagcctccgagacttgttctgggtgcaacaccgctcggtactgtggatcgttctgccagcacaaggattgggaaaagcatcaccacatttgtggccagacactacaggcccaacagcagggcgacaccccagcagtcagctcctcagttactcctaatagtggggccggatctcccatggacacgccaccggctgccacacctcgtagcaccactcccggtaccccatccacaatcgagaccactcccagatga

SEQ ID NO: 593 - RNA, 1704 nt, synthetic construct
  misc_feature 1..1704: note = Homo sapiens__Q06455-4__RUNX1T1a CDS opt3
  source 1..1704: mol_type = other RNA
atgcccgacagccctgtggatgtcaagacccagtccagactgacaccaccgactatgccccctccacccacgacccaaggcgcccctaggacatcttcattcactccaaccacactcaccaacgggaccagtcacagccccacagctcttaatggagcaccttccccaccgaacggtttttctaatggcccctcgtcaagcagttcctctagcctggccaaccagcagttgcctccagcgtgcggggctcggcagttatccaaactgaagcgcttcctaaccacgctccaacagtttggaaatgacatctcacccgagattggcgaacgagttcgtactctggtgcttggtctggtaaacagtaccttgacaatagaggagttccatagcaaactccaggaagccactaattttcctctgagaccattcgtgatcccctttctgaaggcaaacctcccgttactgcagagggaacttttgcactgtgcccggctggctaaacaaaatcctgcacagtacctagcccagcatgagcagctcctgcttgatgcttctaccacatcccccgtcgactcaagcgagctgttgctcgatgtgaacgaaaatgggaagcgcagaaccccagacaggacgaaggagaacggattcgatcgggaacctctgcacagtgagcatccctctaaacgcccatgcactatttcccccggccaacgatatagccctaataacggcttatcgtaccagccaaatgggctgccgcaccccacacctccaccccctcagcactatagactcgacgatatggccatcgcgcatcactacagggactcttatcggcatccatcccaccgtgatcttcgcgacagaaacaggcccatgggactgcacggtacccggcaagaggaaatgattgatcatcgattgactgaccgcgagtgggcagaagagtggaagcacctagaccatctgctcaactgtatcatggatatggttgagaaaacaagaaggtcactgaccgtgcttcggcgctgccaggaagccgacagagaggaactgaattactggataaggcgttatagtgatgctgaggacttgaagaaaggcgggggaagctcctctagccactcacggcagcagagtccggtcaaccctgatccagtggccctcgacgcacatcgagaatttctgcacagacccgcttccggctacgtacctgaggaaatctggaagaaggccgaggaggcggttaatgaagtgaaaaggcaagccatgacggagttacagaaggcagtcagcgaagctgagcgcaaagcccacgatatgattaccacagaacgggctaagatggagagaactgtggccgaggcaaaaaggcaggccgctgaagacgcgctggcagtgatcaaccagcaagaggattcttcagaaagttgttggaattgcggtcgcaaggccagcgagacctgttccgggtgcaacacagctcgatactgtggatctttctgccagcataaagactgggagaagcaccatcacatttgtggccagactctacaggcccaacagcagggcgatacccccgcagtctcgagctccgttacaccaaattcaggggccggaagtcctatggacactcccccagctgccactccgcggtctacgacacctggtacccccagcactatcgaaaccacaccacgttga

SEQ ID NO: 594 - RNA, 1284 nt, synthetic construct
  misc_feature 1..1284: note = Homo sapiens__Q06455-5__RUNX1T1a CDS opt3
  source 1..1284: mol_type = other RNA
atgatcagcgtgaagagaaacacctggagggccctgtccctcgtcattggcgactgccggaaaaaggggaatttcgagtactgtcaggatcgcacagaaaaacactctactatgcccgactcacctgttgatgtgaagacgcaaagtcgacttaccccaccgacaatgccccctccacccactacccagggagctcctcgtacaagctcctttaccccaactacactgaccaacggtacgtctcattcgcccactgcattgaatggcgccccttcaccaccgaacgggttcagcaatggacccagttcctctagctcctcaagtttagcgaaccagcagctgcctccagcttgcggcgccagacaactaagcaaactcaagaggtttctgaccacacttcagcagttcggtaatgacatatctcccgagatcggggaacgggtacgcactctggtgttgggactcgtcaactccaccctgacaattgaggaatttcactcaaagctgcaggaggcaaccaatttccctctcagaccatttgtgatccccttcttaaaagccaacctgccgcttttgcaaagggagctgctacattgtgctcggctcgcaaagcagaatcctgcccagtatctggctcagcacgaacaacttctgttggatgccagcacgacaagtcccgttgactcttccgagctcctgttagatgtgaacgaaaatggcaaacgccgaactccagacagaaccaaggagaacggctttgatagggagcctctgcatagcgaacacccctcgaaacggccatgcactatttctcccgggcagcgttactcccctaataacggactctcatatcagccaaacggtcttccgcaccccacacctccaccccctcaacattaccgcctggacgatatggcgatcgcacaccattatagagacagttacaggcacccaagccaccgggatttgcgagaccgcaatagacccatgggcctacatgggaccaggcaggaggaaatgatagaccaccggctgacggatcgcgagtgggccgaagagtggaagcatctcgaccatctgcttaactgtatcatggatatggtcgagaagaccagaaggtccctgacagtgttgcgtcggtgccaggaagctgaccgagaggaactcaattattggattagaaggtactctgatgccgaggacctgaaaaagggaggcggtagctcaagttcccacagccgccagcaatctccggtaaaccctgatccagttgcattagggtga

SEQ ID NO: 595 - RNA, 1203 nt, synthetic construct
  misc_feature 1..1203: note = Homo sapiens__Q06455-6__RUNX1T1a CDS opt3
  source 1..1203: mol_type = other RNA
atgcccgacagaaccgagaagcacagcacaatgcctgattccccagtggacgtcaaaactcagtctaggctgacgccgcccaccatgcctccaccccctacaactcaaggcgccccacggacctcaagtttcacacccaccactctcacaaacgggaccagccattcccctacggctcttaatggagcaccatctccgcccaacggtttttcgaatggcccttcaagcagttcctctagctccctggccaaccagcagttgccacccgcgtgcggggctcgccagttatcaaagctgaaacgattcctaactaccctccaacagtttggaaatgatatcagtcctgaaattggcgagcgtgttagaacactggtgcttggtctggtaaacagcactttgaccatagaagagttccactctaagctccaggaagccacaaattttccactgaggcccttcgtgatcccgtttctgaaagcaaacctccctttactgcagcgggagcttttgcattgtgcccgcctggctaagcaaaatcccgcacagtacctagcccagcacgagcagctcctgcttgacgcttccaccacgtcaccagtcgatagcagtgaactgttgctcgacgtgaacgagaatgggaagagaaggactcctgatcggacaaaagaaaacggattcgaccgcgagcccctgcattctgagcacccatccaagcgaccctgcaccattagccctggccaaagatattcgccaaataacggcttatcttaccagccgaatgggctgccccaccctactccaccccctccacagcattataggctcgatgacatggccatcgcgcaccattaccgggattcctatcgtcacccctcacaccgcgaccttagagataggaaccggccgatgggactgcatggtacacgacaagaagagatgattgaccaccgcttgaccgacagagaatgggcagaggaatggaaacatctagatcatctgctcaactgtatcatggacatggttgagaagacgaggcggagtctgaccgtgcttcgcagatgccaggaggccgatagggaggaactgaattactggatacgtcggtatagcgacgctgaagatttgaaaaagggcgggggatcctctagctcacacagtcgacagcagtcccctgtcaacccagaccccgtggccctcggctga

SEQ ID NO: 596 - RNA, 1722 nt, synthetic construct
  misc_feature 1..1722: note = Homo sapiens__Q06455-1__RUNX1T1a(31-604) CDS opt3
  source 1..1722: mol_type = other RNA
agaaccgagaagcacagcacaatgcccgactcccctgtggatgtcaaaactcagtctaggctgacgccaccgaccatgccccctccacccacaactcaaggcgcccctcggacctcaagtttcacaccaaccactctcacaaacgggaccagccattcccccacggctcttaatggagcaccttctccaccgaacggtttttcgaatggcccctcaagcagttcctctagctccctggccaaccagcagttgcctccagcgtgcggggctcgccagttatcaaagctgaaacgattcctaactaccctccaacagtttggaaatgacatcagtcccgaaattggcgagcgtgttagaacactggtgcttggtctggtaaacagcactttgaccatagaagagttccactctaagctccaggaagccacaaattttcctctgaggccattcgtgatcccctttctgaaagcaaacctcccgttactgcagcgggagcttttgcattgtgcccgcctggctaagcaaaatcctgcacagtacctagcccagcacgagcagctcctgcttgatgcttccaccacgtcacccgtcgacagcagtgaactgttgctcgatgtgaacgagaatgggaagagaaggactccagaccggacaaaagaaaacggattcgatcgcgagcctctgcattctgagcacccctccaagcgaccatgcaccattagccccggccaaagatattcgcctaataacggcttatcttaccagccaaatgggctgccgcaccccactcctccaccccctcagcattataggctcgacgatatggccatcgcgcaccattaccgggactcctatcgtcacccatcacaccgcgatcttagagacaggaaccggcccatgggactgcatggtacacgacaagaagagatgattgatcaccgcttgaccgacagagaatgggcagaggaatggaaacatctagaccatctgctcaactgtatcatggatatggttgagaagacgaggcggagtctgaccgtgcttcgcagatgccaggaggccgacagggaggaactgaattactggatacgtcggtatagcgatgctgaagacttgaaaaagggcgggggatcctctagctcacacagtcgacagcagtccccggtcaaccctgatccagtggccctcgacgcacacagagagtttctgcacaggcccgctagcggctacgtacctgaagagatctggaagaaagccgaggaagcggttaatgaggtgaagcgccaagccatgacagaattacagaaagcagtctctgaggctgaacggaaggcccatgatatgattactaccgagagagctaaaatggagaggacagtggccgaagcaaagcgccaggccgctgaggacgcgctggcagtgatcaaccagcaagaagattcaagtgagagctgttggaattgcggtcgaaaagcctccgagacttgttctgggtgcaacaccgctcggtactgtggatcgttctgccagcacaaggactgggaaaagcatcaccacatttgtggccagacactacaggcccaacagcagggcgatacccccgcagtcagctcctcagttactccaaatagtggggccggatctcctatggacacgcccccagctgccacaccgcgtagcaccactcctggtaccccctccacaatcgagaccactccaaga

SEQ ID NO: 597 - RNA, 1815 nt, synthetic construct
  misc_feature 1..1815: note = Homo sapiens__O43439-1__RUNX1T1b CDS opt3
  source 1..1815: mol_type = other RNA
atggccaaggagagcggcatctccctgaaagaaattcaggtgctcgctagacaatggaaggtcgggcccgagaaaagggttcctgcaatgccaggatctccggtggaagtaaagatacagtcacggagtagtccccctaccatgccaccccttcctccaatcaaccccggtggccctcgcccagtgtccttcacaccgactgccctgtctaatgggattaaccactcgccccctacgttgaatggagcgccatcaccccctcagcgatttagcaacggcccagctagttccacctctagcgccttaacaaatcagcaactgcccgcaacttgcggtgcccgtcagctatccaaactcaagagattcctgaccacacttcagcagtttgggaacgacatctcaccggagattggagaaaaggtcaggaccctggtgttggctctcgttaatagtactgtgacaatcgaggagttccattgtaaactgcaagaagcaaccaactttcctctgcggcccttcgtcataccatttctcaaggccaatttacctctgcttcagcgcgagttgctgcactgcgctagagccgcgaaacagacgcccagccagtacctagcacaacatgaacacctcctgcttaacacttctatcgcctccccagctgattcaagcgagctgttgatggaggtgcatggcaatggcaagaggcccagtcctgaacggcgcgaggaaaactctttcgaccgagataccattgccccagagccgcccgcaaaaagagtatgtacaatctcccctgctccaaggcacagccccgccctcactgttcctctgatgaatccagggggacagtttcaccccaccccgcctccattacagcattatacactggaagacattgcgacctcgcacctctaccgggagcccaacaagatgcttgagcatcgtgaagtgcgcgatagacaccactctctgggtttgaatggcgggtatcaagacgagctagtcgatcataggctgacggaacgggagtgggccgacgaatggaagcacctcgatcatgcactgaactgcatcatggagatggtggagaaaactcgacgctccatggctgtgcttagaaggtgtcaggaatcagaccgggaggaactgaactactggaagcgcagatataatgagaacacagaattgaggaaaaccggaactgagctcgtcagtcgtcagcacagccctggctccgccgattctctgagcaatgactcacagcgggagttcaacagtcgacccggtacagggtacgttccagtggaattttggaagaaaaccgaggaagctgtaaataaggtgaaaatacaagccatgtccgaggtccagaaggcagtggccgaggctgaacagaaggcgttcgaggttattgcaacggaaagagccaggatggagcagaccatcgctgatgtgaaacgccaagccgcagaagacgcctttttagtcattaacgagcaggaggaaagcacagagaattgctggaactgtggacggaaggcttctgaaacttgctcaggctgtaatatcgccagatattgcggcagtttctgtcagcataaagactgggagaggcaccaccgcctgtgcgggcagaacctacatggacaaagccctcacggtcagggccgacccctcctgccagtggggcggggatcctctgcacgttcggcggattgcagcgtaccgtcccctgctcttgacaagacctcagccacaactagcagatctagcacccccgcatccgttacagccatcgataccaatggcttgtga

SEQ ID NO: 598 - RNA, 1845 nt, synthetic construct
  misc_feature 1..1845: note = Homo sapiens__O43439-4__RUNX1T1b CDS opt3
  source 1..1845: mol_type = other RNA
atgggcttccaccatgtggggcaggccagactggagctccttaccagcggagacctgcccgctttggcatcccaaagggccggtatcacagtcggccctgaaaagcgggttccagcgatgccggggtctcccgtggaggtaaaaattcagtcacgcagtagccctccaactatgccccctttaccacccataaaccctggaggcccacgaccggtgtcctttacgcccaccgctctgtctaatggtatcaaccactcgcctccaacactaaatggggccccctcacctccacagcgtttcagcaacggacccgcaagttccacttctagcgccctcaccaatcagcaactgccggctacatgcggcgcaagacagctttccaagctgaaaaggtttttgaccactctccagcagttcggcaacgatatttcacctgaaatcggggagaaggtccggacactggtgctggccctcgttaatagtaccgtgacgattgaagagtttcattgtaaattacaagaggctactaacttccccctgcgcccatttgtcatccctttccttaaggccaatttgcccctgctacagagagaactcctgcactgcgcgagggcagccaagcagaccccaagccagtaccttgctcaacatgagcacctgttgctcaacacatctatagcctcccccgcagactcaagcgaactgttaatggaggtgcacggaaatggtaaacggcctagtccagagcgccgagaagagaactcttttgatagagacactatcgctccggaaccccctgccaagagggtatgtaccatttccccagcgccccggcatagccctgccctgacagttccactcatgaatcccggcgggcagttccacccgacccctccaccccttcagcattatacgctggaggatatcgcaacttcgcacttgtaccgtgaacctaacaaaatgctagagcaccgcgaggtgagagacaggcatcactctctgggactcaatggcggttatcaagatgaactggtcgaccatcggcttacagagcgagaatgggctgatgagtggaagcacctggaccatgccttgaactgcattatggaaatggtggagaaaacccgcagatccatggctgtgctcaggcggtgtcaggagtcagatcgcgaggaactgaactactggaagagaaggtataatgaaaacactgagttacgtaagacagggaccgaactggtcagtcggcagcacagccccggatccgccgactctctaagcaatgattcacagcgagagtttaacagtagaccaggcacgggctacgttcctgtggagttctggaaaaagaccgaagaggcagtaaataaagtgaagatccaagccatgtccgaagtccagaaagctgtggcggaggcagagcagaaggcctttgaagttatagctacagagagggcccgcatggaacagactattgcagacgtgaaacggcaagccgctgaggacgccttcctcgtcatcaacgaacaggaggagagcaccgaaaattgctggaactgtgggagaaaggcatctgagacatgctcaggatgtaatattgcgaggtattgcggtagtttctgtcagcacaaggattgggaacgccatcaccgactgtgcggccagaaccttcatgggcaaagcccccacggacagggccggccattgctgccggtgggtcgtgggtcctctgctagatcggccgactgcagcgtaccttcccccgcactcgataaaacttcagccaccacaagtaggtctagcaccccagcttccgttactgccatcgacacgaatggcctgtga

SEQ ID NO: 599 - RNA, 1788 nt, synthetic construct
  misc_feature 1..1788: note = Homo sapiens__O43439-5__RUNX1T1b CDS opt3
  source 1..1788: mol_type = other RNA
atggtgggcgtccccggggccgctgcattccagctgggacctgagaagagagttccagccatgccgggtagccccgtggaagtaaaaatccaatccaggtcttcacctccaaccatgccccctctcccacccattaaccctggcgggccacggccggtgagttttacacccactgcgcttagcaatggaataaaccactcccctccaacgctgaatggcgctccctctcctccacagcgcttctcgaacggtcccgcctcaagcaccagttccgcattgacaaatcagcagttaccggccacttgcggggctcgacaactgtctaagctaaaacgttttctcaccacactgcagcagttcggaaacgacatcagccctgagattggcgaaaaggtcagaacccttgtgctggcattggttaattccactgtgacaatcgaggaatttcattgtaaactccaggaggccaccaacttccccctgaggccatttgtcattcctttcctgaaggctaatctccccttactgcaacgggagcttttgcactgcgcccgcgcggcaaagcagacgccatcacagtacctggcccagcatgaacacctactcctgaacaccagtatcgctagccccgccgattcttccgagcttctgatggaagtgcatggcaatgggaaaagaccttcaccagagaggcgggaggaaaacagctttgaccgcgatactatagcaccggagccccctgctaagcgagtatgtacaatcagtccagcccccagacactctcctgcgttgactgttccactcatgaatcccggaggtcaattccacccgacccctccacccctgcagcattatacattagaagacattgccacctcccacctgtacagggagcctaacaaaatgctcgaacatcgggaggtgcgtgatcgccaccacagccttggcctgaatgggggatatcaggacgagttggtcgatcatagactaacggaaagggagtgggcagacgaatggaagcacctggatcatgctctcaactgcatcatggagatggtggagaaaactcggcgatcgatggccgtgctgcgcagatgtcaagaatctgacagggaggaacttaactactggaagcggcgctataatgagaacacagaactgagaaagaccggcactgagttggtctccaggcagcactcacccggtagtgctgatagcctctccaatgactctcagcgtgaatttaacagccggccagggacaggatacgttcctgtggagttctggaaaaagaccgaggaagccgtaaataaagtgaagattcaggcaatgtcagaggtccaaaaagccgtggctgaagcggagcagaaggcatttgaggttatcgccacggaacgagctagaatggagcagaccatagccgatgtgaaaaggcaggcagccgaagacgctttcctggtcattaacgagcaagaagagagtacagagaattgctggaactgtggccgcaaggcctccgaaacttgcagcggctgtaatatcgcacggtattgcgggtctttctgtcagcataaggactgggagagacaccacaggttatgcggacagaacctgcatggtcagtcaccccacggccaagggcgcccactactcccggtgggacgaggcagtagcgcgcggtccgctgattgctctgtaccttcgcccgccctggacaaaaccagcgcaacaacttcccgttcaagtaccccagcctctgttacagctattgataccaatggtctttga

SEQ ID NO: 600 - RNA, 1728 nt, synthetic construct
  misc_feature 1..1728: note = Homo sapiens__O43439-2__RUNX1T1b CDS opt3
  source 1..1728: mol_type = other RNA
atgcccggcagccctgtggaggtcaagatccagtccagatcttcaccaccgaccatgccccctctgccacccattaaccctgggggaccaaggcccgttagtttcacacctactgccctcagcaatggtataaaccactccccaccgacgcttaatggcgctccctctcctccacaacggttttcgaacgggcccgcatcaagcaccagttccgccctgacaaatcagcagttgcctgcgacttgcggagctcgccagttatctaaactgaagcgattcctaaccacactccaacagtttggcaacgacatcagcccagaaattggtgagaaagtgcgtaccctggtacttgccctggtgaatagtactgtcacaatcgaagagttccattgtaagttgcaggaagcaaccaactttcccctcagaccgttcgtgattccttttctgaaagccaatctgcccctcttacagagggagctgcttcactgcgctcgggcagccaagcaaacgccatcacagtacttggctcagcatgagcatctgctactcaacacttccatcgccagccctgcggattcttccgaactgcttatggaggttcacgggaatggaaagcgcccctcaccagaaagaagggaggagaacagcttcgaccgggataccatagcacccgaacctccagccaaacgcgtgtgtacaatcagtccggctccccgacactctcctgccctgactgtcccattgatgaatcccggcggccagtttcaccctaccccacccccgctccaacattatacactggaggacattgcaacctcccacttatacagagaacctaacaagatgctggagcatagggaagtgcgggatcgtcaccacagcctcgggcttaatggaggttatcaggacgagctggtagatcatcgcttgacggagagagaatgggctgacgagtggaaacacctagatcatgccctgaactgcatcatggaaatggttgagaagactaggcggtcgatggcggtgctccgacgctgtcaggaatctgacagagaggagctgaactactggaaaaggcggtataatgaaaacacagagcttcgcaagaccggcactgaactggtctccagacaacactcaccagggagtgccgatagcttgtccaatgactctcagagggagttcaacagccgtcccggaacaggctacgtgcctgtggaattttggaagaaaaccgaggaggcagtcaataaggttaaaattcaggctatgtcagaagtgcagaaggccgtagctgaggccgaacaaaaagcattcgaggtgatcgccacggagcgggctcgaatggaacagaccatagcggatgtcaagagacaggcagccgaggacgcttttctcgtgattaacgaacaggaggaaagtacagagaattgctggaactgtggtaggaaagcctccgagacttgcagcgggtgtaatatcgcacgctattgcggatctttctgtcaacataaggactgggaacggcaccacagactgtgcggccagaacttacatggccagtcaccccacgggcagggaaggccactgctacctgttggtcgcggcagtagcgcccgatccgctgattgctctgtgccctcgccagccctcgacaagaccagcgcaacaacttcccggtcaagtaccccggcgtctgtcacagctattgataccaatgggctgtga

SEQ ID NO: 601 - RNA, 48 nt, synthetic construct
  misc_feature 1..48: note = Homo sapiens____RUNX1T1b(short) CDS opt3
  source 1..48: mol_type = other RNA
gaggtgggcttctgccacgtcgcccaggttgggctgaagctccttgga

SEQ ID NO: 602 - RNA, 1749 nt, synthetic construct
  misc_feature 1..1749: note = Homo sapiens__O43439-1__RUNX1T1b(22-604) CDS opt3
  source 1..1749: mol_type = other RNA
ggccccgagaagagagtgcctgccatgccagggagcccggtcgaagttaaaatccagtccaggtcttcaccccctaccatgccacccctgcctccaattaaccccggaggtcctcggccagtgagtttcacaccgactgctctcagcaatggcataaaccacagtccccctacgcttaatggggcaccatctccccctcaacgcttttcgaacggaccagcctcaagcaccagttccgcgctgacaaatcagcagttgcccgctacttgcggcgcccgacagttatctaagctgaaacgtttcctaaccacactccaacagtttggtaacgacatcagcccggagattggggaaaaggtaagaaccctggtgcttgcactggtcaattccactgtgacaatcgaggagttccattgtaaattgcaggaagccaccaactttcctctcaggcccttcgttattccatttctgaaggctaatctgcctctcttacagcgggagctgcttcactgcgcacgcgccgctaagcaaacgccctcacagtacttggcccagcatgaacatctgctactcaacacttccatcgcgagcccagcagattcttccgagctgcttatggaagtgcacggaaatggcaaaagaccctcacctgagaggcgggaggaaaacagcttcgaccgcgataccatagccccagagccgcccgctaagcgagtctgtacaatcagtcctgccccaagacactctcccgcactgactgtgcctttgatgaatccaggcgggcagtttcaccccaccccgcctccactccaacattatacactggaagacattgctacctcccacttatacagggagcccaacaaaatgctggaacatcgggaggtacgtgatcgccaccacagcctcggacttaatggtggctatcaggacgagctggttgatcatagattgacggaaagggagtgggccgacgaatggaagcacctagatcatgcgctgaactgcatcatggagatggtggagaaaactcggcgatcgatggccgtcctccgcagatgtcaggaatctgacagggaggaactgaactactggaagcggcgctataatgagaacacagaacttagaaagaccgggactgagctggtgtccaggcaacactcacctggaagtgcagatagcttgtccaatgactctcagcgtgagttcaacagccggcccggcacaggttacgtgccagtcgaattttggaaaaagaccgaggaagctgttaataaagtgaagattcaggccatgtcagaggtacagaaagctgtggccgaagcagagcaaaaggccttcgaggtcatcgctacggaacgagcgagaatggagcagaccatagcagatgtgaaaaggcaggccgctgaagacgcctttctcgttattaacgagcaggaagagagtacagagaattgctggaactgtgggcgcaaggcatccgaaacttgcagcggatgtaatatcgcccggtattgcggctctttctgtcaacataaggactgggagagacaccacaggctgtgcggccagaacttacatgggcagtcacctcacggacagggtcgccccctgctaccagtgggccgagggagtagcgctcggtccgccgattgctctgtcccgtcgcctgcactcgacaaaaccagcgcgacaacttcccgttcaagtacccccgcttctgtgacagccattgataccaatggactg

SEQ ID NO: 603 - RNA, 1836 nt, synthetic construct
  misc_feature 1..1836: note = Homo sapiens____CBFbeta(1-165)_SMMHC(1527-1972) CDS opt3
  source 1..1836: mol_type = other RNA
atgcccagagtggtccctgaccagaggagcaagttcgagaacgaagagtttttccggaaactgtcccgcgaatgcgagatcaagtacaccggctttcgagatcgtccacacgaagagagacaagccaggttccagaatgcttgtcgggacgggcgctctgagattgcatttgttgccacaggaactaacctctcacttcagttctttccggcgagttggcagggtgaacaaagacagacgcccagcagggagtatgtggatctggaacgggaggctggcaaagtatacttgaaggcccctatgatattaaatggggtgtgcgtcatctggaaaggatggattgacctgcagcgcctagatggcatgggttgtctcgagttcgacgaggaacgagcacagcaagaagatgccctggctcagcaggcatttgaggaagccagaaggcggacccgtgagttcgaggaccgcgatagatcccatagggaagagatggaagtgcacgagcttgaaaagtctaagcgggctctggagacacagatggaggaaatgaaaactcaattggaggaactcgaggacgaactgcaggccaccgaggatgcgaagctgcgactcgaggttaacatgcaggcattaaaagggcaatttgaacgcgacctgcaggccagagatgagcagaatgaagagaagaggcggcagcttcaacgccagttgcatgagtatgaaacagagctggaagacgagagaaaacagagggctctagccgcagctgccaagaagaaactcgaaggagacctgaaggatcttgagctgcaggcggactcggccatcaaaggccgtgaggaagcaattaagcaattgcggaaactccaggctcagatgaaggatttccagcgagagctggaagacgccagagcttcaagggatgagatctttgccaccgcaaaagaaaacgagaagaaggccaagagcttagaggctgacctgatgcaactccaggaagatcttgcggcagccgagcgcgctcggaagcaggccgacctggaaaaagaggaattggcagaggagctagccagttccctgtctggcagaaatgctctccaggatgaaaagaggcgcctggaggcccgaatagcacaacttgaagaggagctggaagaggaacaggggaacatggaggcgatgagcgaccgggtgcgtaaagctactcagcaagccgaacagttgtccaatgagctcgcaacagagagatcaaccgcccagaagaacgaaagtgctaggcagcaactggagcgccagaataaggaattacggagcaaactgcacgagatggaaggagccgtcaagtctaaattcaagtccacgatcgcagctctagaggccaaaattgcgcagctcgaggaacaggtggagcaagaagccagagagaagcaggctgcaactaagtcactgaaacagaaggataaaaagttgaaagaaatccttctgcaggtagaggacgagaggaagatggccgaacaatacaaggagcaggctgaaaaaggtaacgcccgagttaagcagctcaaacgccaactggaggaggcagaagaggaaagccagcggattaatgcgaacagaaggaaacttcagcgtgagctggacgaagccaccgagagtaatgaggctatgggccgcgaagtgaacgccttgaaatctaagctccggagagggaacgagacatccttcgtcccaagcaggcgatcgggaggccggcgcgtgatcgaaaatgcagatggttctgaggaagagactgacaccagagatgctgactttaacgggacaaaagcctccgagtga

SEQ ID NO: 604 - RNA, 1551 nt, synthetic construct
  misc_feature 1..1551: note = Artificial____CBFbeta(1-165)_SMMHC(1527-1877) CDS opt3
  source 1..1551: mol_type = other RNA
atgcccagagtggtccctgaccagaggagcaagttcgagaacgaagagtttttccggaaactgtcccgcgaatgcgagatcaagtacaccggctttcgagatcgtccacacgaagagagacaagccaggttccagaatgcttgtcgggacgggcgctctgagattgcatttgttgccacaggaactaacctctcacttcagttctttccggcgagttggcagggtgaacaaagacagacgcccagcagggagtatgtggatctggaacgggaggctggcaaagtatacttgaaggcccctatgatattaaatggggtgtgcgtcatctggaaaggatggattgacctgcagcgcctagatggcatgggttgtctcgagttcgacgaggaacgagcacagcaagaagatgccctggctcagcaggcatttgaggaagccagaaggcggacccgtgagttcgaggaccgcgatagatcccatagggaagagatggaagtgcacgagcttgaaaagtctaagcgggctctggagacacagatggaggaaatgaaaactcaattggaggaactcgaggacgaactgcaggccaccgaggatgcgaagctgcgactcgaggttaacatgcaggcattaaaagggcaatttgaacgcgacctgcaggccagagatgagcagaatgaagagaagaggcggcagcttcaacgccagttgcatgagtatgaaacagagctggaagacgagagaaaacagagggctctagccgcagctgccaagaagaaactcgaaggagacctgaaggatcttgagctgcaggcggactcggccatcaaaggccgtgaggaagcaattaagcaattgcggaaactccaggctcagatgaaggatttccagcgagagctggaagacgccagagcttcaagggatgagatctttgccaccgcaaaagaaaacgagaagaaggccaaaagccttgaggctgacctgatgcaactccaggaagatcttgcggcagccgagcgcgctcggaagcaggccgacctggaaaaagaggaattggcagaggagctagccagttccctgtctggcagaaatgctctccaggatgaaaagaggcgcctggaggcccgaatagcacaacttgaagaggagctggaagaggaacaggggaacatggaggcgatgagcgaccgggtgcgtaaagctactcagcaagccgaacagttgtccaatgagctcgcaacagagagatcaaccgcccagaagaacgaaagtgctaggcagcaactggagcgccagaataaggaattacggagcaaactgcacgagatggaaggagccgtcaagtctaaattcaagtccacgatcgcagctctagaggccaaaattgcgcagctcgaggaacaggtggagcaagaagccagagagaagcaggctgcaactaagtcactgaaacagaaggataaaaagttaaaagaaatcttgctgcaggtagaggacgagaggaagatggccgaacaatacaaggagcaggctgaaaaaggtaacgcctga

SEQ ID NO: 605 - RNA, 612 nt, synthetic construct
  misc_feature 1..612: note = Artificial____CBFbeta(1-165)_Linker_Lifeact CDS opt3
  source 1..612: mol_type = other RNA
atgcccagagtggtccctgaccagaggagcaagttcgagaacgaagagtttttccggaaactgtcccgcgaatgcgagatcaagtacaccggctttcgagatcgtccacacgaagagagacaagccaggttccagaatgcttgtcgggacgggcgctctgagattgcatttgttgccacaggaactaacctctcacttcagttctttccggcgagttggcagggtgaacaaagacagacgcccagcagggagtatgtggatctggaacgggaggctggcaaagtatacttgaaggcccctatgatattaaatggggtgtgcgtcatctggaaaggatggattgacctgcagcgcctagatggcatgggttgtctcgagttcgacgaggaacgagcacagcaagaagatgccctggctcagcaggcatttgaggaagccagaaggcggacccgtgagttcgaggaccgcgatagatcccatagggaagagatggaagggggatctggcggctcagggggatcgggtggcagcgggggaggcggtgtggctgaccttatcaagaagtttgagagtatttccaaagaagagggggatccacccgttgccacatga

SEQ ID NO: 606 - RNA, 579 nt, synthetic construct
  misc_feature 1..579: note = Artificial____CBFbeta(1-165)_HIF1alpha(549-575) CDS opt3
  source 1..579: mol_type = other RNA
atgcccagagtggtccctgaccagaggagcaagttcgagaacgaagagtttttccggaaactgtcccgcgaatgcgagatcaagtacaccggctttcgagatcgtccacacgaagagagacaagccaggttccagaatgcttgtcgggacgggcgctctgagattgcatttgttgccacaggaactaacctctcacttcagttctttccggcgagttggcagggtgaacaaagacagacgcccagcagggagtatgtggatctggaacgggaggctggcaaagtatacttgaaggcccctatgatattaaatggggtgtgcgtcatctggaaaggatggattgacctgcagcgcctagatggcatgggttgtctcgagttcgacgaggaacgagcacagcaagaagatgccctggctcagcaggcatttgaggaagccagaaggcggacccgtgagttcgaggaccgcgatagatcccatagggaagagatggaaccattttctacacaggacactgatcttgacctggagatgttggctccctatatccctatggatgacgacttccaactccggtga

SEQ ID NO: 607 - RNA, 624 nt, synthetic construct
  misc_feature 1..624: note Artificial____CBFbeta(1-165)_Linker_HIF1alpha(549-575) CDS opt3
  source 1..624: mol_type = other RNA
atgcccagagtggtccctgaccagaggagcaagttcgagaacgaagagtttttccggaaactgtcccgcgaatgcgagatcaagtacaccggctttcgagatcgtccacacgaagagagacaagccaggttccagaatgcttgtcgggacgggcgctctgagattgcatttgttgccacaggaactaacctctcacttcagttctttccggcgagttggcagggtgaacaaagacagacgcccagcagggagtatgtggatctggaacgggaggctggcaaagtatacttgaaggcccctatgatattaaatggggtgtgcgtcatctggaaaggatggattgacctgcagcgcctagatggcatgggttgtctcgagttcgacgaggaacgagcacagcaagaagatgccctggctcagcaggcatttgaggaagccagaaggcggacccgtgagttcgaggaccgcgatagatcccatagggaagagatggaagggggatctggcggctcagggggatcgggtggcagcgggggaggcccatttagtacacaggacactgatcttgacctggagatgttggctccctatatccctatggatgacgacttccaactccggtga

SEQ ID NO: 608 - RNA, 2259 nt, synthetic construct
  misc_feature 1..2259: note = Artificial____RUNX1(1-177)_N_RUNX1T1a(31-604) CDS opt3
  source 1..2259: mol_type = other RNA
atgagaatccccgtggacgccagcacctccaggcggttcacacctccatctactgctctgtcaccgggcaagatgagtgaggcactcccccttggggcccctgatgcgggagctgccctggcaggtaaattgcgcagcggcgaccgatccatggtcgaagttttagccgatcacccaggggagctggtgcgtacggactctcccaactttctatgctcggtactccctacccattggagatgtaataagacactgccaattgctttcaaagtggtcgcacttggagatgtgcccgacggcactctggttaccgtgatggccggtaacgatgaaaattactcagctgagttgaggaacgccacagcggcaatgaagaatcaggtcgcccggtttaacgacctccgcttcgtggggagaagcggaaggggcaaaagttttaccctgactataacagtattcaccaatcctccacaagttgctacgtatcaccgggccatcaagattactgtggatggcccgcgcgaaccccgaaacagaaccgagaagcattccacaatgcctgactctccagtcgatgtgaaaactcagagcaggctgacaccccctaccatgccacccccgcctaccacgcagggggcaccccggacttcctcatttacaccaaccactctcacaaatggaaccagtcacagccctacggctttaaacggtgccccctctccacccaatggcttctccaacgggccttcaagcagttcttccagctcgctggcgaatcagcaacttccaccggcctgcggagcacgtcagttgtctaagctgaaacgctttctaaccacactccagcagttcggcaacgacatctcccccgagattggtgaaagagtgaggactctggtccttgggctggttaattcaaccttgacaatcgaggaatttcatagtaagctccaagaggctactaacttccctctgcggccatttgtgatacccttcttaaaagccaacctgcctctccttcagcgagagctgttgcactgtgctcgcctagccaagcagaatccagcacagtacctggcccaacacgaacagctcctgcttgatgctagcaccacatcccccgtagactctagcgagctgttgctcgacgtgaacgaaaatggaaagagaaggaccccggatcggactaaagagaacggcttcgaccgcgaacctctgcattcagagcacccaagtaagagaccctgcacgatctcccctggccagaggtatagccccaataacgggttatcttaccaaccaaatggactgcctcatcccacaccaccgcctccccagcactatcgtctagatgacatggcgattgcacaccattaccgggattcatatcgacacccaagtcatagagacctcagggatcgcaaccggcccatgggtctgcacggcaccagacaggaggaaatgatcgaccataggcttactgatcgcgagtgggccgaagagtggaaacacttggaccatctgctcaattgtattatggatatggtcgaaaagacccgacggagcctgacagtgcttcgtagatgccaggaggctgacagggaggaactgaactactggatccgccggtactccgacgccgaggatttgaaaaagggcggagggtcttcgagctcccactcaagacaacagagtcctgttaatccagaccccgtggcactcgatgcccacagggaatttctgcatcgacctgcttctggttatgtcccggaggaaatatggaaaaaggccgaggaggcagtgaacgaagtaaagcgccaggcgatgaccgagttacagaaagctgttagcgaagccgagcggaaggcacacgacatgattactacagagagagccaaaatggaaaggacggtggctgaggccaagcgtcaagcagctgaagatgccctggcggtcatcaatcagcaggaggactcctcagaaagctgttggaactgcgggcgcaaagcctctgagacctgttccggctgcaatactgctcggtactgtggaagtttctgccagcacaaggattgggagaagcatcaccatatttgcggccaaacactacaggcacagcagcaaggggacaccccagccgtgtctagctccgtcacacccaactcaggagctggtagtcctatggatactccacccgccgcaacccctagaagcacgaccccgggcacaccctcgactatcgaaaccacaccaaggtga

SEQ ID NO: 609 - RNA, 774 nt, synthetic construct
  misc_feature 1..774: note = Artificial____RUNX1(1-241)_RUNX1T1b(short) CDS opt3
  source 1..774: mol_type = other RNA
atgagaatccccgtggacgccagcacctccaggcggttcacacctccatctactgctctgtcaccgggcaagatgagtgaggcactcccccttggggcccctgatgcgggagctgccctggcaggtaaattgcgcagcggcgaccgatccatggtcgaagttttagccgatcacccaggggagctggtgcgtacggactctcccaactttctatgctcggtactccctacccattggagatgtaataagacactgccaattgctttcaaagtggtcgcacttggagatgtgcccgacggcactctggttaccgtgatggccggtaacgatgaaaattactcagctgagttgaggaacgccacagcggcaatgaagaatcaggtcgcccggtttaacgacctccgcttcgtggggagaagcggaaggggcaaaagttttaccctgactataacagtattcaccaatcctccacaagttgctacgtatcaccgggccatcaagattactgtggatggcccgcgcgaaccccgaagacataggcagaagctggacgatcagaccaaacctgggtccctctcttttagcgagcggttatccgagctggaacagcttcgtcgcacagcaatgagagtctcaccacaccatcccgctcctactccaaaccccagggccagtttgaatcacagcaccgcgttcaacccgcaacctcagtctcagatgcaggaggtgggattttgccacgtggcccaagtcggtctgaagctactcggctga

SEQ ID NO: 610 - RNA, 2478 nt, synthetic construct
  misc_feature 1..2478: note = Artificial____RUNX1(1-241)_V_RUNX1T1b(22-604) CDS opt3
  source 1..2478: mol_type = other RNA
atgagaatccccgtggacgccagcacctccaggcggttcacacctccatctactgctctgtcaccgggcaagatgagtgaggcactcccccttggggcccctgatgcgggagctgccctggcaggtaaattgcgcagcggcgaccgatccatggtcgaagttttagccgatcacccaggggagctggtgcgtacggactctcccaactttctatgctcggtactccctacccattggagatgtaataagacactgccaattgctttcaaagtggtcgcacttggagatgtgcccgacggcactctggttaccgtgatggccggtaacgatgaaaattactcagctgagttgaggaacgccacagcggcaatgaagaatcaggtcgcccggtttaacgacctccgcttcgtggggagaagcggaaggggcaaaagttttaccctgactataacagtattcaccaatcctccacaagttgctacgtatcaccgggccatcaagattactgtggatggcccgcgcgaaccccgaagacataggcagaagctggacgatcagaccaaacctgggtccctctcttttagcgagcggttatccgagctggaacagcttcgtcgcacagcaatgagagtctcaccacaccatcccgctcctactccaaaccccagggccagtttgaatcacagcaccgcgttcaacccgcaacctcagtctcagatgcaagtgggacccgagaagcgggtgccagccatgcctggttcccccgtcgaagttaaaatccagtcacgaagcagtccacccacaatgcctccactgccgcccattaatcctggcgggccacgccccgtgtcttttacccctacggcactatccaacggaatcaatcacagcccacccactctcaacggcgctccgtcgcctccacagagattctctaatggtcccgcctcctcaacaagtagcgctctgaccaaccagcagcttcctgccacttgcggggcaaggcaactgtccaagttgaaacggtttctcacaaccctgcagcagttcggaaacgacatatctcccgagatcggcgagaaggtacgcacgttagtgctggccctcgtcaatagcaccgtgacaattgaagagtttcattgtaagctacaagaagctactaacttcccactgagacctttcgttatcccctttttgaaagcgaatctaccactgctccagagggagctgcttcactgcgcacgtgccgctaagcagaccccgtcacagtacctggcccaacatgaacacttgctcctgaacacaagtattgcatcccctgccgatagctctgagttactgatggaggtgcacggcaatgggaaacggccctcaccagaacgaagagaggaaaacagtttcgacagggacactatcgctcccgagcctccagccaagcgcgtctgtaccataagccccgcacctcggcattccccggcgctaacagtgccactcatgaatcccggaggtcagtttcaccctaccccaccccctctgcagcattatactcttgaagatattgctacgtctcacttgtacagagagccgaacaaaatgctggagcatagggaagtacgcgaccgacaccactcgctcggcctgaatgggggatatcaggatgagcttgttgaccatcggctgacagaacgtgagtgggccgatgaatggaagcacttggaccatgcactcaactgcatcatggagatggtggagaaaaccagaaggagcatggccgtcctgcgccggtgtcaagaatccgatagagaggaattaaattactggaagaggcgatataacgagaatactgagctgcgcaagaccggcacagaacttgtgtcacggcagcacagtcccggttctgctgacagcctctccaacgattcacagagagagttcaatagcaggccagggaccggctacgtccctgtggaattttggaaaaagactgaggaagccgttaacaaagtgaagattcaggcaatgtctgaggtacaaaaagctgtcgccgaggcggaacagaaggccttcgaggtgatcgctacagaacgtgcacgcatggagcagacgatcgccgacgttaagcggcaggctgccgaagatgcatttctggtgattaacgagcaagaggaatccaccgagaattgctggaactgtggaagaaaagcgagtgaaacttgcagcggctgtaatatagccaggtactgcgggtctttctgccagcacaaggactgggagcgacatcaccggctttgtggacagaacttgcatggtcaatcaccccacggccaggggcgcccactgctccctgtcggaagaggctccagtgctaggagcgccgactgctcggtgccctccccagcactggataaaacatctgctaccacaagccggtcaagtactccggcctccgtaaccgcaatcgacacgaatggtttatga

SEQ ID NO: 611 - RNA, 2478 nt, synthetic construct
  misc_feature 1..2478: note = Artificial____RUNX1(1-241)_I_RUNX1T1b(22-604) CDS opt3
  source 1..2478: mol_type = other RNA
atgagaatccccgtggacgccagcacctccaggcggttcacacctccatctactgctctgtcaccgggcaagatgagtgaggcactcccccttggggcccctgatgcgggagctgccctggcaggtaaattgcgcagcggcgaccgatccatggtcgaagttttagccgatcacccaggggagctggtgcgtacggactctcccaactttctatgctcggtactccctacccattggagatgtaataagacactgccaattgctttcaaagtggtcgcacttggagatgtgcccgacggcactctggttaccgtgatggccggtaacgatgaaaattactcagctgagttgaggaacgccacagcggcaatgaagaatcaggtcgcccggtttaacgacctccgcttcgtggggagaagcggaaggggcaaaagttttaccctgactataacagtattcaccaatcctccacaagttgctacgtatcaccgggccatcaagattactgtggatggcccgcgcgaaccccgaagacataggcagaagctggacgatcagaccaaacctgggtccctctcttttagcgagcggttatccgagctggaacagcttcgtcgcacagcaatgagagtctcaccacaccatcccgctcctactccaaaccccagggccagtttgaatcacagcaccgcgttcaacccgcaacctcagtctcagatgcagatcggacccgagaagcgggtgccagccatgcctggttcccccgtggaagtcaaaattcaatcacgaagcagtccacccacaatgcctccactgccgcccatcaatcctggcgggccacgccccgtttcttttacccctacggcactatccaacggaataaatcacagcccacccactctcaacggcgctccgtcgcctccacagagattctctaatggtcccgcctcctcaacaagtagcgctctgaccaaccagcagcttcctgccacttgcggggcaaggcaactgtccaagttgaaacggtttctcacaaccctgcagcagttcggaaacgacatctctcccgagattggcgagaaggtgcgcacgttagtactggccctcgtgaatagcaccgtcacaatcgaagagtttcattgtaagctacaagaagctactaacttcccactgagacctttcgtgattccctttttgaaagcgaatctaccactgctccagagggagctgcttcactgcgcacgtgccgctaagcagaccccgtcacagtacctggcccaacatgaacacttgctcctgaacacaagtatcgcatcccctgccgatagctctgagttactgatggaggttcacggcaatgggaaacggccctcaccagaacgaagagaggaaaacagtttcgacagggacactatagctcccgagcctccagccaagcgcgtgtgtaccattagccccgcacctcggcattccccggcgctaacagtcccactcatgaatcccggaggtcagtttcaccctaccccaccccctctgcagcattatactcttgaagatatcgctacgtctcacttgtacagagagccgaacaaaatgctggagcatagggaagtgcgcgaccgacaccactcgctcggcctgaatgggggatatcaggatgagcttgtagaccatcggctgacagaacgtgagtgggccgatgaatggaagcacttggaccatgcactcaactgcattatggagatggttgagaaaaccagaaggagcatggccgtgctgcgccggtgtcaagaatccgatagagaggaattaaattactggaagaggcgatataacgagaatactgagctgcgcaagaccggcacagaacttgtctcacggcagcacagtcccggttctgctgacagcctctccaacgattcacagagagagttcaatagcaggccagggaccggctacgtgcctgtcgaattttggaaaaagactgaggaagccgtgaacaaagttaagatccaggcaatgtctgaggtgcaaaaagctgtagccgaggcggaacagaaggccttcgaggtcatcgctacagaacgtgcacgcatggagcagacgattgccgacgtgaagcggcaggctgccgaagatgcatttctggttataaacgagcaagaggaatccaccgagaattgctggaactgtggaagaaaagcgagtgaaacttgcagcggctgtaatatcgccaggtactgcgggtctttctgccagcacaaggactgggagcgacatcaccggctttgtggacagaacttgcatggtcaatcaccccacggccaggggcgcccactgctccctgtgggaagaggctccagtgctaggagcgccgactgctcggtcccctccccagcactggataaaacatctgctaccacaagccggtcaagtactccggcctccgtgaccgcaattgacacgaatggtttatga

SEQ ID NO: 612 - RNA, 549 nt, synthetic construct
  misc_feature 1..549: note = Homo sapiens__Q13951-1__CBFbeta CDS opt4
  source 1..549: mol_type = other RNA
atgcccagagtggtgcccgaccagagaagcaagttcgagaacgaggagttcttcagaaagctgagcagagagtgcgagatcaagtacaccggcttcagagacagaccccacgaggagagacaggccagattccagaacgcctgcagagacggcagaagcgagatcgccttcgtggccaccggcaccaacctgagcctgcagttcttccccgccagctggcagggcgagcagagacagacccccagcagagagtacgtggacctggagagagaggccggcaaggtgtacctgaaggcccccatgatcctgaacggcgtgtgcgtgatctggaagggctggatcgacctgcagagactggacggcatgggctgcctggagttcgacgaggagagagcccagcaggaggacgccctggcccagcaggccttcgaggaggccagaagaagaaccagagagttcgaggacagagacagaagccacagagaggagatggaggtgagagtgagccagctgctggccgtgaccggcaagaagaccaccagaccctga

SEQ ID NO: 613 - RNA, 672 nt, synthetic construct
  misc_feature 1..672: note = Homo sapiens__A0A494C0A9__CBFbeta CDS opt4
  source 1..672: mol_type = other RNA
atgcccagagtggtgcccgaccagagaagcaagttcgagaacgaggagttcttcagaaagctgagcagagagtgcgagatcaagtacaccggcttcagagacagaccccacgaggagagacaggccagattccagaacgcctgcagagacggcagaagcgagatcgccttcgtggccaccggcaccaacctgagcctgcagttcttccccgccagctggcagggcgagcagagacagacccccagcagagagtacgtggacctggagagagaggccggcaaggtgtacctgaaggcccccatgatcctgaacggcgtgtgcgtgatctggaagggctggatcgacctgcagagactggacggcatgggctgcctggagttcgacgaggagagagcccagcaggaggacgccctggcccagcaggccttcgaggaggccagaagaagaaccagagagttcgaggacagagacagaagccacagagaggagatggaggtgagagtgagccagctgctggccgtgaccgagtggagaagcaccagaaagttcagcagcttctggatccccccccccagaggctgcttctgcatcgccctgaccagcagagagaacagcagctgctggtgcgtgttcttcagactgatctggagccacctgatgaccgccagctga

SEQ ID NO: 614 - RNA, 609 nt, synthetic construct
  misc_feature 1..609: note = Homo sapiens__J3KRT0__CBFbeta CDS opt4
  source 1..609: mol_type = other RNA
atgcccagagtggtgcccgaccagagaagcaagttcgagaacgaggagttcttcagaaagctgagcagagagtgcgagatcaagtacaccggcttcagagacagaccccacgaggagagacaggccagattccagaacgcctgcagagacggcagaagcgagatcgtgagcagactggccagaggcgccagaggcagcctggtggccagaggcagaggcggccccggcagattcagaaccgccgccagactgctgagactgcccgagctgagcggcagaagactgaccagctacagcggcttcaagatgagaaaccagatgcccagagccggcaccagaggcgagaccctgttcctgggcctggccgccgtggccagagtgggccagagaagcaccgccagcggcgccagaaccagagccagactgaacaagagaagagccctgttcagaagaagacacagaagaagagtgcagggcatctgcagcaagcagacccccatcagaaagaagaagtggagcttcatccagggcttctgcggccacagaaaccagagcgtgagccccgtgttcagcggccagctggccggcagaaccgccaccaacacctga

SEQ ID NO: 615 - RNA, 564 nt, synthetic construct
  misc_feature 1..564: note = Homo sapiens__Q13951-2__CBFbeta CDS opt4
  source 1..564: mol_type = other RNA
atgcccagagtggtgcccgaccagagaagcaagttcgagaacgaggagttcttcagaaagctgagcagagagtgcgagatcaagtacaccggcttcagagacagaccccacgaggagagacaggccagattccagaacgcctgcagagacggcagaagcgagatcgccttcgtggccaccggcaccaacctgagcctgcagttcttccccgccagctggcagggcgagcagagacagacccccagcagagagtacgtggacctggagagagaggccggcaaggtgtacctgaaggcccccatgatcctgaacggcgtgtgcgtgatctggaagggctggatcgacctgcagagactggacggcatgggctgcctggagttcgacgaggagagagcccagcaggaggacgccctggcccagcaggccttcgaggaggccagaagaagaaccagagagttcgaggacagagacagaagccacagagaggagatggaggccagaagacagcaggaccccagccccggcagcaacctgggcggcggcgacgacctgaagctgagatga

SEQ ID NO: 616 - RNA, 423 nt, synthetic construct
  misc_feature 1..423: note = Homo sapiens__Q13951-1__CBFbeta(1-141) CDS opt4
  source 1..423: mol_type = other RNA
atgcccagagtggtgcccgaccagagaagcaagttcgagaacgaggagttcttcagaaagctgagcagagagtgcgagatcaagtacaccggcttcagagacagaccccacgaggagagacaggccagattccagaacgcctgcagagacggcagaagcgagatcgccttcgtggccaccggcaccaacctgagcctgcagttcttccccgccagctggcagggcgagcagagacagacccccagcagagagtacgtggacctggagagagaggccggcaaggtgtacctgaaggcccccatgatcctgaacggcgtgtgcgtgatctggaagggctggatcgacctgcagagactggacggcatgggctgcctggagttcgacgaggagagagcccagcaggaggacgccctggcccagcag

SEQ ID NO: 617 - RNA, 495 nt, synthetic construct
  misc_feature 1..495: note = Homo sapiens__Q13951-1__CBFbeta(1-165) CDS opt4
  source 1..495: mol_type = other RNA
atgcccagagtggtgcccgaccagagaagcaagttcgagaacgaggagttcttcagaaagctgagcagagagtgcgagatcaagtacaccggcttcagagacagaccccacgaggagagacaggccagattccagaacgcctgcagagacggcagaagcgagatcgccttcgtggccaccggcaccaacctgagcctgcagttcttccccgccagctggcagggcgagcagagacagacccccagcagagagtacgtggacctggagagagaggccggcaaggtgtacctgaaggcccccatgatcctgaacggcgtgtgcgtgatctggaagggctggatcgacctgcagagactggacggcatgggctgcctggagttcgacgaggagagagcccagcaggaggacgccctggcccagcaggccttcgaggaggccagaagaagaaccagagagttcgaggacagagacagaagccacagagaggagatggag

SEQ ID NO: 618 - RNA, 5919 nt, synthetic construct
  misc_feature 1..5919: note = Homo sapiens__P35749-1__SMMHC CDS opt4
  source 1..5919: mol_type = other RNA
atggcccagaagggccagctgagcgacgacgagaagttcctgttcgtggacaagaacttcatcaacagccccgtggcccaggccgactgggccgccaagagactggtgtgggtgcccagcgagaagcagggcttcgaggccgccagcatcaaggaggagaagggcgacgaggtggtggtggagctggtggagaacggcaagaaggtgaccgtgggcaaggacgacatccagaagatgaacccccccaagttcagcaaggtggaggacatggccgagctgacctgcctgaacgaggccagcgtgctgcacaacctgagagagagatacttcagcggcctgatctacacctacagcggcctgttctgcgtggtggtgaacccctacaagcacctgcccatctacagcgagaagatcgtggacatgtacaagggcaagaagagacacgagatgcccccccacatctacgccatcgccgacaccgcctacagaagcatgctgcaggacagagaggaccagagcatcctgtgcaccggcgagagcggcgccggcaagaccgagaacaccaagaaggtgatccagtacctggccgtggtggccagcagccacaagggcaagaaggacaccagcatcaccggcgagctggagaagcagctgctgcaggccaaccccatcctggaggccttcggcaacgccaagaccgtgaagaacgacaacagcagcagattcggcaagttcatcagaatcaacttcgacgtgaccggctacatcgtgggcgccaacatcgagacctacctgctggagaagagcagagccatcagacaggccagagacgagagaaccttccacatcttctactacatgatcgccggcgccaaggagaagatgagaagcgacctgctgctggagggcttcaacaactacaccttcctgagcaacggcttcgtgcccatccccgccgcccaggacgacgagatgttccaggagaccgtggaggccatggccatcatgggcttcagcgaggaggagcagctgagcatcctgaaggtggtgagcagcgtgctgcagctgggcaacatcgtgttcaagaaggagagaaacaccgaccaggccagcatgcccgacaacaccgccgcccagaaggtgtgccacctgatgggcatcaacgtgaccgacttcaccagaagcatcctgacccccagaatcaaggtgggcagagacgtggtgcagaaggcccagaccaaggagcaggccgacttcgccgtggaggccctggccaaggccacctacgagagactgttcagatggatcctgaccagagtgaacaaggccctggacaagacccacagacagggcgccagcttcctgggcatcctggacatcgccggcttcgagatcttcgaggtgaacagcttcgagcagctgtgcatcaactacaccaacgagaagctgcagcagctgttcaaccacaccatgttcatcctggagcaggaggagtaccagagagagggcatcgagtggaacttcatcgacttcggcctggacctgcagccctgcatcgagctgatcgagagacccaacaacccccccggcgtgctggccctgctggacgaggagtgctggttccccaaggccaccgacaagagcttcgtggagaagctgtgcaccgagcagggcagccaccccaagttccagaagcccaagcagctgaaggacaagaccgagttcagcatcatccactacgccggcaaggtggactacaacgccagcgcctggctgaccaagaacatggaccccctgaacgacaacgtgaccagcctgctgaacgccagcagcgacaagttcgtggccgacctgtggaaggacgtggacagaatcgtgggcctggaccagatggccaagatgaccgagagcagcctgcccagcgccagcaagaccaagaagggcatgttcagaaccgtgggccagctgtacaaggagcagctgggcaagctgatgaccaccctgagaaacaccacccccaacttcgtgagatgcatcatccccaaccacgagaagagaagcggcaagctggacgccttcctggtgctggagcagctgagatgcaacggcgtgctggagggcatcagaatctgcagacagggcttccccaacagaatcgtgttccaggagttcagacagagatacgagatcctggccgccaacgccatccccaagggcttcatggacggcaagcaggcctgcatcctgatgatcaaggccctggagctggaccccaacctgtacagaatcggccagagcaagatcttcttcagaaccggcgtgctggcccacctggaggaggagagagacctgaagatcaccgacgtgatcatggccttccaggccatgtgcagaggctacctggccagaaaggccttcgccaagagacagcagcagctgaccgccatgaaggtgatccagagaaactgcgccgcctacctgaagctgagaaactggcagtggtggagactgttcaccaaggtgaagcccctgctgcaggtgaccagacaggaggaggagatgcaggccaaggaggacgagctgcagaagaccaaggagagacagcagaaggccgagaacgagctgaaggagctggagcagaagcacagccagctgaccgaggagaagaacctgctgcaggagcagctgcaggccgagaccgagctgtacgccgaggccgaggagatgagagtgagactggccgccaagaagcaggagctggaggagatcctgcacgagatggaggccagactggaggaggaggaggacagaggccagcagctgcaggccgagagaaagaagatggcccagcagatgctggacctggaggagcagctggaggaggaggaggccgccagacagaagctgcagctggagaaggtgaccgccgaggccaagatcaagaagctggaggacgagatcctggtgatggacgaccagaacaacaagctgagcaaggagagaaagctgctggaggagagaatcagcgacctgaccaccaacctggccgaggaggaggagaaggccaagaacctgaccaagctgaagaacaagcacgagagcatgatcagcgagctggaggtgagactgaagaaggaggagaagagcagacaggagctggagaagctgaagagaaagctggagggcgacgccagcgacttccacgagcagatcgccgacctgcaggcccagatcgccgagctgaagatgcagctggccaagaaggaggaggagctgcaggccgccctggccagactggacgacgagatcgcccagaagaacaacgccctgaagaagatcagagagctggagggccacatcagcgacctgcaggaggacctggacagcgagagagccgccagaaacaaggccgagaagcagaagagagacctgggcgaggagctggaggccctgaagaccgagctggaggacaccctggacagcaccgccacccagcaggagctgagagccaagagagagcaggaggtgaccgtgctgaagaaggccctggacgaggagaccagaagccacgaggcccaggtgcaggagatgagacagaagcacgcccaggccgtggaggagctgaccgagcagctggagcagttcaagagagccaaggccaacctggacaagaacaagcagaccctggagaaggagaacgccgacctggccggcgagctgagagtgctgggccaggccaagcaggaggtggagcacaagaagaagaagctggaggcccaggtgcaggagctgcagagcaagtgcagcgacggcgagagagccagagccgagctgaacgacaaggtgcacaagctgcagaacgaggtggagagcgtgaccggcatgctgaacgaggccgagggcaaggccatcaagctggccaaggacgtggccagcctgagcagccagctgcaggacacccaggagctgctgcaggaggagaccagacagaagctgaacgtgagcaccaagctgagacagctggaggaggagagaaacagcctgcaggaccagctggacgaggagatggaggccaagcagaacctggagagacacatcagcaccctgaacatccagctgagcgacagcaagaagaagctgcaggacttcgccagcaccgtggaggccctggaggagggcaagaagagattccagaaggagatcgagaacctgacccagcagtacgaggagaaggccgccgcctacgacaagctggagaagaccaagaacagactgcagcaggagctggacgacctggtggtggacctggacaaccagagacagctggtgagcaacctggagaagaagcagagaaagttcgaccagctgctggccgaggagaagaacatcagcagcaagtacgccgacgagagagacagagccgaggccgaggccagagagaaggagaccaaggccctgagcctggccagagccctggaggaggccctggaggccaaggaggagctggagagaaccaacaagatgctgaaggccgagatggaggacctggtgagcagcaaggacgacgtgggcaagaacgtgcacgagctggagaagagcaagagagccctggagacccagatggaggagatgaagacccagctggaggagctggaggacgagctgcaggccaccgaggacgccaagctgagactggaggtgaacatgcaggccctgaagggccagttcgagagagacctgcaggccagagacgagcagaacgaggagaagagaagacagctgcagagacagctgcacgagtacgagaccgagctggaggacgagagaaagcagagagccctggccgccgccgccaagaagaagctggagggcgacctgaaggacctggagctgcaggccgacagcgccatcaagggcagagaggaggccatcaagcagctgagaaagctgcaggcccagatgaaggacttccagagagagctggaggacgccagagccagcagagacgagatcttcgccaccgccaaggagaacgagaagaaggccaagagcctggaggccgacctgatgcagctgcaggaggacctggccgccgccgagagagccagaaagcaggccgacctggagaaggaggagctggccgaggagctggccagcagcctgagcggcagaaacgccctgcaggacgagaagagaagactggaggccagaatcgcccagctggaggaggagctggaggaggagcagggcaacatggaggccatgagcgacagagtgagaaaggccacccagcaggccgagcagctgagcaacgagctggccaccgagagaagcaccgcccagaagaacgagagcgccagacagcagctggagagacagaacaaggagctgagaagcaagctgcacgagatggagggcgccgtgaagagcaagttcaagagcaccatcgccgccctggaggccaagatcgcccagctggaggagcaggtggagcaggaggccagagagaagcaggccgccaccaagagcctgaagcagaaggacaagaagctgaaggagatcctgctgcaggtggaggacgagagaaagatggccgagcagtacaaggagcaggccgagaagggcaacgccagagtgaagcagctgaagagacagctggaggaggccgaggaggagagccagagaatcaacgccaacagaagaaagctgcagagagagctggacgaggccaccgagagcaacgaggccatgggcagagaggtgaacgccctgaagagcaagctgagaagaggcaacgagaccagcttcgtgcccagcagaagaagcggcggcagaagagtgatcgagaacgccgacggcagcgaggaggagaccgacaccagagacgccgacttcaacggcaccaaggccagcgagtga

SEQ ID NO: 619 - RNA, 5940 nt, synthetic construct
  misc_feature 1..5940: note = Homo sapiens__P35749-2__SMMHC CDS opt4
  source 1..5940: mol_type = other RNA
atggcccagaagggccagctgagcgacgacgagaagttcctgttcgtggacaagaacttcatcaacagccccgtggcccaggccgactgggccgccaagagactggtgtgggtgcccagcgagaagcagggcttcgaggccgccagcatcaaggaggagaagggcgacgaggtggtggtggagctggtggagaacggcaagaaggtgaccgtgggcaaggacgacatccagaagatgaacccccccaagttcagcaaggtggaggacatggccgagctgacctgcctgaacgaggccagcgtgctgcacaacctgagagagagatacttcagcggcctgatctacacctacagcggcctgttctgcgtggtggtgaacccctacaagcacctgcccatctacagcgagaagatcgtggacatgtacaagggcaagaagagacacgagatgcccccccacatctacgccatcgccgacaccgcctacagaagcatgctgcaggacagagaggaccagagcatcctgtgcaccggcgagagcggcgccggcaagaccgagaacaccaagaaggtgatccagtacctggccgtggtggccagcagccacaagggcaagaaggacaccagcatcacccagggccccagcttcgcctacggcgagctggagaagcagctgctgcaggccaaccccatcctggaggccttcggcaacgccaagaccgtgaagaacgacaacagcagcagattcggcaagttcatcagaatcaacttcgacgtgaccggctacatcgtgggcgccaacatcgagacctacctgctggagaagagcagagccatcagacaggccagagacgagagaaccttccacatcttctactacatgatcgccggcgccaaggagaagatgagaagcgacctgctgctggagggcttcaacaactacaccttcctgagcaacggcttcgtgcccatccccgccgcccaggacgacgagatgttccaggagaccgtggaggccatggccatcatgggcttcagcgaggaggagcagctgagcatcctgaaggtggtgagcagcgtgctgcagctgggcaacatcgtgttcaagaaggagagaaacaccgaccaggccagcatgcccgacaacaccgccgcccagaaggtgtgccacctgatgggcatcaacgtgaccgacttcaccagaagcatcctgacccccagaatcaaggtgggcagagacgtggtgcagaaggcccagaccaaggagcaggccgacttcgccgtggaggccctggccaaggccacctacgagagactgttcagatggatcctgaccagagtgaacaaggccctggacaagacccacagacagggcgccagcttcctgggcatcctggacatcgccggcttcgagatcttcgaggtgaacagcttcgagcagctgtgcatcaactacaccaacgagaagctgcagcagctgttcaaccacaccatgttcatcctggagcaggaggagtaccagagagagggcatcgagtggaacttcatcgacttcggcctggacctgcagccctgcatcgagctgatcgagagacccaacaacccccccggcgtgctggccctgctggacgaggagtgctggttccccaaggccaccgacaagagcttcgtggagaagctgtgcaccgagcagggcagccaccccaagttccagaagcccaagcagctgaaggacaagaccgagttcagcatcatccactacgccggcaaggtggactacaacgccagcgcctggctgaccaagaacatggaccccctgaacgacaacgtgaccagcctgctgaacgccagcagcgacaagttcgtggccgacctgtggaaggacgtggacagaatcgtgggcctggaccagatggccaagatgaccgagagcagcctgcccagcgccagcaagaccaagaagggcatgttcagaaccgtgggccagctgtacaaggagcagctgggcaagctgatgaccaccctgagaaacaccacccccaacttcgtgagatgcatcatccccaaccacgagaagagaagcggcaagctggacgccttcctggtgctggagcagctgagatgcaacggcgtgctggagggcatcagaatctgcagacagggcttccccaacagaatcgtgttccaggagttcagacagagatacgagatcctggccgccaacgccatccccaagggcttcatggacggcaagcaggcctgcatcctgatgatcaaggccctggagctggaccccaacctgtacagaatcggccagagcaagatcttcttcagaaccggcgtgctggcccacctggaggaggagagagacctgaagatcaccgacgtgatcatggccttccaggccatgtgcagaggctacctggccagaaaggccttcgccaagagacagcagcagctgaccgccatgaaggtgatccagagaaactgcgccgcctacctgaagctgagaaactggcagtggtggagactgttcaccaaggtgaagcccctgctgcaggtgaccagacaggaggaggagatgcaggccaaggaggacgagctgcagaagaccaaggagagacagcagaaggccgagaacgagctgaaggagctggagcagaagcacagccagctgaccgaggagaagaacctgctgcaggagcagctgcaggccgagaccgagctgtacgccgaggccgaggagatgagagtgagactggccgccaagaagcaggagctggaggagatcctgcacgagatggaggccagactggaggaggaggaggacagaggccagcagctgcaggccgagagaaagaagatggcccagcagatgctggacctggaggagcagctggaggaggaggaggccgccagacagaagctgcagctggagaaggtgaccgccgaggccaagatcaagaagctggaggacgagatcctggtgatggacgaccagaacaacaagctgagcaaggagagaaagctgctggaggagagaatcagcgacctgaccaccaacctggccgaggaggaggagaaggccaagaacctgaccaagctgaagaacaagcacgagagcatgatcagcgagctggaggtgagactgaagaaggaggagaagagcagacaggagctggagaagctgaagagaaagctggagggcgacgccagcgacttccacgagcagatcgccgacctgcaggcccagatcgccgagctgaagatgcagctggccaagaaggaggaggagctgcaggccgccctggccagactggacgacgagatcgcccagaagaacaacgccctgaagaagatcagagagctggagggccacatcagcgacctgcaggaggacctggacagcgagagagccgccagaaacaaggccgagaagcagaagagagacctgggcgaggagctggaggccctgaagaccgagctggaggacaccctggacagcaccgccacccagcaggagctgagagccaagagagagcaggaggtgaccgtgctgaagaaggccctggacgaggagaccagaagccacgaggcccaggtgcaggagatgagacagaagcacgcccaggccgtggaggagctgaccgagcagctggagcagttcaagagagccaaggccaacctggacaagaacaagcagaccctggagaaggagaacgccgacctggccggcgagctgagagtgctgggccaggccaagcaggaggtggagcacaagaagaagaagctggaggcccaggtgcaggagctgcagagcaagtgcagcgacggcgagagagccagagccgagctgaacgacaaggtgcacaagctgcagaacgaggtggagagcgtgaccggcatgctgaacgaggccgagggcaaggccatcaagctggccaaggacgtggccagcctgagcagccagctgcaggacacccaggagctgctgcaggaggagaccagacagaagctgaacgtgagcaccaagctgagacagctggaggaggagagaaacagcctgcaggaccagctggacgaggagatggaggccaagcagaacctggagagacacatcagcaccctgaacatccagctgagcgacagcaagaagaagctgcaggacttcgccagcaccgtggaggccctggaggagggcaagaagagattccagaaggagatcgagaacctgacccagcagtacgaggagaaggccgccgcctacgacaagctggagaagaccaagaacagactgcagcaggagctggacgacctggtggtggacctggacaaccagagacagctggtgagcaacctggagaagaagcagagaaagttcgaccagctgctggccgaggagaagaacatcagcagcaagtacgccgacgagagagacagagccgaggccgaggccagagagaaggagaccaaggccctgagcctggccagagccctggaggaggccctggaggccaaggaggagctggagagaaccaacaagatgctgaaggccgagatggaggacctggtgagcagcaaggacgacgtgggcaagaacgtgcacgagctggagaagagcaagagagccctggagacccagatggaggagatgaagacccagctggaggagctggaggacgagctgcaggccaccgaggacgccaagctgagactggaggtgaacatgcaggccctgaagggccagttcgagagagacctgcaggccagagacgagcagaacgaggagaagagaagacagctgcagagacagctgcacgagtacgagaccgagctggaggacgagagaaagcagagagccctggccgccgccgccaagaagaagctggagggcgacctgaaggacctggagctgcaggccgacagcgccatcaagggcagagaggaggccatcaagcagctgagaaagctgcaggcccagatgaaggacttccagagagagctggaggacgccagagccagcagagacgagatcttcgccaccgccaaggagaacgagaagaaggccaagagcctggaggccgacctgatgcagctgcaggaggacctggccgccgccgagagagccagaaagcaggccgacctggagaaggaggagctggccgaggagctggccagcagcctgagcggcagaaacgccctgcaggacgagaagagaagactggaggccagaatcgcccagctggaggaggagctggaggaggagcagggcaacatggaggccatgagcgacagagtgagaaaggccacccagcaggccgagcagctgagcaacgagctggccaccgagagaagcaccgcccagaagaacgagagcgccagacagcagctggagagacagaacaaggagctgagaagcaagctgcacgagatggagggcgccgtgaagagcaagttcaagagcaccatcgccgccctggaggccaagatcgcccagctggaggagcaggtggagcaggaggccagagagaagcaggccgccaccaagagcctgaagcagaaggacaagaagctgaaggagatcctgctgcaggtggaggacgagagaaagatggccgagcagtacaaggagcaggccgagaagggcaacgccagagtgaagcagctgaagagacagctggaggaggccgaggaggagagccagagaatcaacgccaacagaagaaagctgcagagagagctggacgaggccaccgagagcaacgaggccatgggcagagaggtgaacgccctgaagagcaagctgagaagaggcaacgagaccagcttcgtgcccagcagaagaagcggcggcagaagagtgatcgagaacgccgacggcagcgaggaggagaccgacaccagagacgccgacttcaacggcaccaaggccagcgagtga

SEQ ID NO: 620 - RNA, 5838 nt, synthetic construct
  misc_feature 1..5838: note = Homo sapiens__P35749-3__SMMHC CDS opt4
  source 1..5838: mol_type = other RNA
atggcccagaagggccagctgagcgacgacgagaagttcctgttcgtggacaagaacttcatcaacagccccgtggcccaggccgactgggccgccaagagactggtgtgggtgcccagcgagaagcagggcttcgaggccgccagcatcaaggaggagaagggcgacgaggtggtggtggagctggtggagaacggcaagaaggtgaccgtgggcaaggacgacatccagaagatgaacccccccaagttcagcaaggtggaggacatggccgagctgacctgcctgaacgaggccagcgtgctgcacaacctgagagagagatacttcagcggcctgatctacacctacagcggcctgttctgcgtggtggtgaacccctacaagcacctgcccatctacagcgagaagatcgtggacatgtacaagggcaagaagagacacgagatgcccccccacatctacgccatcgccgacaccgcctacagaagcatgctgcaggacagagaggaccagagcatcctgtgcaccggcgagagcggcgccggcaagaccgagaacaccaagaaggtgatccagtacctggccgtggtggccagcagccacaagggcaagaaggacaccagcatcacccagggccccagcttcgcctacggcgagctggagaagcagctgctgcaggccaaccccatcctggaggccttcggcaacgccaagaccgtgaagaacgacaacagcagcagattcggcaagttcatcagaatcaacttcgacgtgaccggctacatcgtgggcgccaacatcgagacctacctgctggagaagagcagagccatcagacaggccagagacgagagaaccttccacatcttctactacatgatcgccggcgccaaggagaagatgagaagcgacctgctgctggagggcttcaacaactacaccttcctgagcaacggcttcgtgcccatccccgccgcccaggacgacgagatgttccaggagaccgtggaggccatggccatcatgggcttcagcgaggaggagcagctgagcatcctgaaggtggtgagcagcgtgctgcagctgggcaacatcgtgttcaagaaggagagaaacaccgaccaggccagcatgcccgacaacaccgccgcccagaaggtgtgccacctgatgggcatcaacgtgaccgacttcaccagaagcatcctgacccccagaatcaaggtgggcagagacgtggtgcagaaggcccagaccaaggagcaggccgacttcgccgtggaggccctggccaaggccacctacgagagactgttcagatggatcctgaccagagtgaacaaggccctggacaagacccacagacagggcgccagcttcctgggcatcctggacatcgccggcttcgagatcttcgaggtgaacagcttcgagcagctgtgcatcaactacaccaacgagaagctgcagcagctgttcaaccacaccatgttcatcctggagcaggaggagtaccagagagagggcatcgagtggaacttcatcgacttcggcctggacctgcagccctgcatcgagctgatcgagagacccaacaacccccccggcgtgctggccctgctggacgaggagtgctggttccccaaggccaccgacaagagcttcgtggagaagctgtgcaccgagcagggcagccaccccaagttccagaagcccaagcagctgaaggacaagaccgagttcagcatcatccactacgccggcaaggtggactacaacgccagcgcctggctgaccaagaacatggaccccctgaacgacaacgtgaccagcctgctgaacgccagcagcgacaagttcgtggccgacctgtggaaggacgtggacagaatcgtgggcctggaccagatggccaagatgaccgagagcagcctgcccagcgccagcaagaccaagaagggcatgttcagaaccgtgggccagctgtacaaggagcagctgggcaagctgatgaccaccctgagaaacaccacccccaacttcgtgagatgcatcatccccaaccacgagaagagaagcggcaagctggacgccttcctggtgctggagcagctgagatgcaacggcgtgctggagggcatcagaatctgcagacagggcttccccaacagaatcgtgttccaggagttcagacagagatacgagatcctggccgccaacgccatccccaagggcttcatggacggcaagcaggcctgcatcctgatgatcaaggccctggagctggaccccaacctgtacagaatcggccagagcaagatcttcttcagaaccggcgtgctggcccacctggaggaggagagagacctgaagatcaccgacgtgatcatggccttccaggccatgtgcagaggctacctggccagaaaggccttcgccaagagacagcagcagctgaccgccatgaaggtgatccagagaaactgcgccgcctacctgaagctgagaaactggcagtggtggagactgttcaccaaggtgaagcccctgctgcaggtgaccagacaggaggaggagatgcaggccaaggaggacgagctgcagaagaccaaggagagacagcagaaggccgagaacgagctgaaggagctggagcagaagcacagccagctgaccgaggagaagaacctgctgcaggagcagctgcaggccgagaccgagctgtacgccgaggccgaggagatgagagtgagactggccgccaagaagcaggagctggaggagatcctgcacgagatggaggccagactggaggaggaggaggacagaggccagcagctgcaggccgagagaaagaagatggcccagcagatgctggacctggaggagcagctggaggaggaggaggccgccagacagaagctgcagctggagaaggtgaccgccgaggccaagatcaagaagctggaggacgagatcctggtgatggacgaccagaacaacaagctgagcaaggagagaaagctgctggaggagagaatcagcgacctgaccaccaacctggccgaggaggaggagaaggccaagaacctgaccaagctgaagaacaagcacgagagcatgatcagcgagctggaggtgagactgaagaaggaggagaagagcagacaggagctggagaagctgaagagaaagctggagggcgacgccagcgacttccacgagcagatcgccgacctgcaggcccagatcgccgagctgaagatgcagctggccaagaaggaggaggagctgcaggccgccctggccagactggacgacgagatcgcccagaagaacaacgccctgaagaagatcagagagctggagggccacatcagcgacctgcaggaggacctggacagcgagagagccgccagaaacaaggccgagaagcagaagagagacctgggcgaggagctggaggccctgaagaccgagctggaggacaccctggacagcaccgccacccagcaggagctgagagccaagagagagcaggaggtgaccgtgctgaagaaggccctggacgaggagaccagaagccacgaggcccaggtgcaggagatgagacagaagcacgcccaggccgtggaggagctgaccgagcagctggagcagttcaagagagccaaggccaacctggacaagaacaagcagaccctggagaaggagaacgccgacctggccggcgagctgagagtgctgggccaggccaagcaggaggtggagcacaagaagaagaagctggaggcccaggtgcaggagctgcagagcaagtgcagcgacggcgagagagccagagccgagctgaacgacaaggtgcacaagctgcagaacgaggtggagagcgtgaccggcatgctgaacgaggccgagggcaaggccatcaagctggccaaggacgtggccagcctgagcagccagctgcaggacacccaggagctgctgcaggaggagaccagacagaagctgaacgtgagcaccaagctgagacagctggaggaggagagaaacagcctgcaggaccagctggacgaggagatggaggccaagcagaacctggagagacacatcagcaccctgaacatccagctgagcgacagcaagaagaagctgcaggacttcgccagcaccgtggaggccctggaggagggcaagaagagattccagaaggagatcgagaacctgacccagcagtacgaggagaaggccgccgcctacgacaagctggagaagaccaagaacagactgcagcaggagctggacgacctggtggtggacctggacaaccagagacagctggtgagcaacctggagaagaagcagagaaagttcgaccagctgctggccgaggagaagaacatcagcagcaagtacgccgacgagagagacagagccgaggccgaggccagagagaaggagaccaaggccctgagcctggccagagccctggaggaggccctggaggccaaggaggagctggagagaaccaacaagatgctgaaggccgagatggaggacctggtgagcagcaaggacgacgtgggcaagaacgtgcacgagctggagaagagcaagagagccctggagacccagatggaggagatgaagacccagctggaggagctggaggacgagctgcaggccaccgaggacgccaagctgagactggaggtgaacatgcaggccctgaagggccagttcgagagagacctgcaggccagagacgagcagaacgaggagaagagaagacagctgcagagacagctgcacgagtacgagaccgagctggaggacgagagaaagcagagagccctggccgccgccgccaagaagaagctggagggcgacctgaaggacctggagctgcaggccgacagcgccatcaagggcagagaggaggccatcaagcagctgagaaagctgcaggcccagatgaaggacttccagagagagctggaggacgccagagccagcagagacgagatcttcgccaccgccaaggagaacgagaagaaggccaagagcctggaggccgacctgatgcagctgcaggaggacctggccgccgccgagagagccagaaagcaggccgacctggagaaggaggagctggccgaggagctggccagcagcctgagcggcagaaacgccctgcaggacgagaagagaagactggaggccagaatcgcccagctggaggaggagctggaggaggagcagggcaacatggaggccatgagcgacagagtgagaaaggccacccagcaggccgagcagctgagcaacgagctggccaccgagagaagcaccgcccagaagaacgagagcgccagacagcagctggagagacagaacaaggagctgagaagcaagctgcacgagatggagggcgccgtgaagagcaagttcaagagcaccatcgccgccctggaggccaagatcgcccagctggaggagcaggtggagcaggaggccagagagaagcaggccgccaccaagagcctgaagcagaaggacaagaagctgaaggagatcctgctgcaggtggaggacgagagaaagatggccgagcagtacaaggagcaggccgagaagggcaacgccagagtgaagcagctgaagagacagctggaggaggccgaggaggagagccagagaatcaacgccaacagaagaaagctgcagagagagctggacgaggccaccgagagcaacgaggccatgggcagagaggtgaacgccctgaagagcaagctgagaggcccccccccccaggagaccagccagtga

SEQ ID NO: 621 - RNA, 5817 nt, synthetic construct
  misc_feature 1..5817: note = Homo sapiens__P35749-4__SMMHC CDS opt4
  source 1..5817: mol_type = other RNA
atggcccagaagggccagctgagcgacgacgagaagttcctgttcgtggacaagaacttcatcaacagccccgtggcccaggccgactgggccgccaagagactggtgtgggtgcccagcgagaagcagggcttcgaggccgccagcatcaaggaggagaagggcgacgaggtggtggtggagctggtggagaacggcaagaaggtgaccgtgggcaaggacgacatccagaagatgaacccccccaagttcagcaaggtggaggacatggccgagctgacctgcctgaacgaggccagcgtgctgcacaacctgagagagagatacttcagcggcctgatctacacctacagcggcctgttctgcgtggtggtgaacccctacaagcacctgcccatctacagcgagaagatcgtggacatgtacaagggcaagaagagacacgagatgcccccccacatctacgccatcgccgacaccgcctacagaagcatgctgcaggacagagaggaccagagcatcctgtgcaccggcgagagcggcgccggcaagaccgagaacaccaagaaggtgatccagtacctggccgtggtggccagcagccacaagggcaagaaggacaccagcatcaccggcgagctggagaagcagctgctgcaggccaaccccatcctggaggccttcggcaacgccaagaccgtgaagaacgacaacagcagcagattcggcaagttcatcagaatcaacttcgacgtgaccggctacatcgtgggcgccaacatcgagacctacctgctggagaagagcagagccatcagacaggccagagacgagagaaccttccacatcttctactacatgatcgccggcgccaaggagaagatgagaagcgacctgctgctggagggcttcaacaactacaccttcctgagcaacggcttcgtgcccatccccgccgcccaggacgacgagatgttccaggagaccgtggaggccatggccatcatgggcttcagcgaggaggagcagctgagcatcctgaaggtggtgagcagcgtgctgcagctgggcaacatcgtgttcaagaaggagagaaacaccgaccaggccagcatgcccgacaacaccgccgcccagaaggtgtgccacctgatgggcatcaacgtgaccgacttcaccagaagcatcctgacccccagaatcaaggtgggcagagacgtggtgcagaaggcccagaccaaggagcaggccgacttcgccgtggaggccctggccaaggccacctacgagagactgttcagatggatcctgaccagagtgaacaaggccctggacaagacccacagacagggcgccagcttcctgggcatcctggacatcgccggcttcgagatcttcgaggtgaacagcttcgagcagctgtgcatcaactacaccaacgagaagctgcagcagctgttcaaccacaccatgttcatcctggagcaggaggagtaccagagagagggcatcgagtggaacttcatcgacttcggcctggacctgcagccctgcatcgagctgatcgagagacccaacaacccccccggcgtgctggccctgctggacgaggagtgctggttccccaaggccaccgacaagagcttcgtggagaagctgtgcaccgagcagggcagccaccccaagttccagaagcccaagcagctgaaggacaagaccgagttcagcatcatccactacgccggcaaggtggactacaacgccagcgcctggctgaccaagaacatggaccccctgaacgacaacgtgaccagcctgctgaacgccagcagcgacaagttcgtggccgacctgtggaaggacgtggacagaatcgtgggcctggaccagatggccaagatgaccgagagcagcctgcccagcgccagcaagaccaagaagggcatgttcagaaccgtgggccagctgtacaaggagcagctgggcaagctgatgaccaccctgagaaacaccacccccaacttcgtgagatgcatcatccccaaccacgagaagagaagcggcaagctggacgccttcctggtgctggagcagctgagatgcaacggcgtgctggagggcatcagaatctgcagacagggcttccccaacagaatcgtgttccaggagttcagacagagatacgagatcctggccgccaacgccatccccaagggcttcatggacggcaagcaggcctgcatcctgatgatcaaggccctggagctggaccccaacctgtacagaatcggccagagcaagatcttcttcagaaccggcgtgctggcccacctggaggaggagagagacctgaagatcaccgacgtgatcatggccttccaggccatgtgcagaggctacctggccagaaaggccttcgccaagagacagcagcagctgaccgccatgaaggtgatccagagaaactgcgccgcctacctgaagctgagaaactggcagtggtggagactgttcaccaaggtgaagcccctgctgcaggtgaccagacaggaggaggagatgcaggccaaggaggacgagctgcagaagaccaaggagagacagcagaaggccgagaacgagctgaaggagctggagcagaagcacagccagctgaccgaggagaagaacctgctgcaggagcagctgcaggccgagaccgagctgtacgccgaggccgaggagatgagagtgagactggccgccaagaagcaggagctggaggagatcctgcacgagatggaggccagactggaggaggaggaggacagaggccagcagctgcaggccgagagaaagaagatggcccagcagatgctggacctggaggagcagctggaggaggaggaggccgccagacagaagctgcagctggagaaggtgaccgccgaggccaagatcaagaagctggaggacgagatcctggtgatggacgaccagaacaacaagctgagcaaggagagaaagctgctggaggagagaatcagcgacctgaccaccaacctggccgaggaggaggagaaggccaagaacctgaccaagctgaagaacaagcacgagagcatgatcagcgagctggaggtgagactgaagaaggaggagaagagcagacaggagctggagaagctgaagagaaagctggagggcgacgccagcgacttccacgagcagatcgccgacctgcaggcccagatcgccgagctgaagatgcagctggccaagaaggaggaggagctgcaggccgccctggccagactggacgacgagatcgcccagaagaacaacgccctgaagaagatcagagagctggagggccacatcagcgacctgcaggaggacctggacagcgagagagccgccagaaacaaggccgagaagcagaagagagacctgggcgaggagctggaggccctgaagaccgagctggaggacaccctggacagcaccgccacccagcaggagctgagagccaagagagagcaggaggtgaccgtgctgaagaaggccctggacgaggagaccagaagccacgaggcccaggtgcaggagatgagacagaagcacgcccaggccgtggaggagctgaccgagcagctggagcagttcaagagagccaaggccaacctggacaagaacaagcagaccctggagaaggagaacgccgacctggccggcgagctgagagtgctgggccaggccaagcaggaggtggagcacaagaagaagaagctggaggcccaggtgcaggagctgcagagcaagtgcagcgacggcgagagagccagagccgagctgaacgacaaggtgcacaagctgcagaacgaggtggagagcgtgaccggcatgctgaacgaggccgagggcaaggccatcaagctggccaaggacgtggccagcctgagcagccagctgcaggacacccaggagctgctgcaggaggagaccagacagaagctgaacgtgagcaccaagctgagacagctggaggaggagagaaacagcctgcaggaccagctggacgaggagatggaggccaagcagaacctggagagacacatcagcaccctgaacatccagctgagcgacagcaagaagaagctgcaggacttcgccagcaccgtggaggccctggaggagggcaagaagagattccagaaggagatcgagaacctgacccagcagtacgaggagaaggccgccgcctacgacaagctggagaagaccaagaacagactgcagcaggagctggacgacctggtggtggacctggacaaccagagacagctggtgagcaacctggagaagaagcagagaaagttcgaccagctgctggccgaggagaagaacatcagcagcaagtacgccgacgagagagacagagccgaggccgaggccagagagaaggagaccaaggccctgagcctggccagagccctggaggaggccctggaggccaaggaggagctggagagaaccaacaagatgctgaaggccgagatggaggacctggtgagcagcaaggacgacgtgggcaagaacgtgcacgagctggagaagagcaagagagccctggagacccagatggaggagatgaagacccagctggaggagctggaggacgagctgcaggccaccgaggacgccaagctgagactggaggtgaacatgcaggccctgaagggccagttcgagagagacctgcaggccagagacgagcagaacgaggagaagagaagacagctgcagagacagctgcacgagtacgagaccgagctggaggacgagagaaagcagagagccctggccgccgccgccaagaagaagctggagggcgacctgaaggacctggagctgcaggccgacagcgccatcaagggcagagaggaggccatcaagcagctgagaaagctgcaggcccagatgaaggacttccagagagagctggaggacgccagagccagcagagacgagatcttcgccaccgccaaggagaacgagaagaaggccaagagcctggaggccgacctgatgcagctgcaggaggacctggccgccgccgagagagccagaaagcaggccgacctggagaaggaggagctggccgaggagctggccagcagcctgagcggcagaaacgccctgcaggacgagaagagaagactggaggccagaatcgcccagctggaggaggagctggaggaggagcagggcaacatggaggccatgagcgacagagtgagaaaggccacccagcaggccgagcagctgagcaacgagctggccaccgagagaagcaccgcccagaagaacgagagcgccagacagcagctggagagacagaacaaggagctgagaagcaagctgcacgagatggagggcgccgtgaagagcaagttcaagagcaccatcgccgccctggaggccaagatcgcccagctggaggagcaggtggagcaggaggccagagagaagcaggccgccaccaagagcctgaagcagaaggacaagaagctgaaggagatcctgctgcaggtggaggacgagagaaagatggccgagcagtacaaggagcaggccgagaagggcaacgccagagtgaagcagctgaagagacagctggaggaggccgaggaggagagccagagaatcaacgccaacagaagaaagctgcagagagagctggacgaggccaccgagagcaacgaggccatgggcagagaggtgaacgccctgaagagcaagctgagaggcccccccccccaggagaccagccagtga

SEQ ID NO: 622 - RNA, 1338 nt, synthetic construct
  misc_feature 1..1338: note = Homo sapiens__P35749-1__SMMHC(1527-1972) CDS opt4
  source 1..1338: mol_type = other RNA
gtgcacgagctggagaagagcaagagagccctggagacccagatggaggagatgaagacccagctggaggagctggaggacgagctgcaggccaccgaggacgccaagctgagactggaggtgaacatgcaggccctgaagggccagttcgagagagacctgcaggccagagacgagcagaacgaggagaagagaagacagctgcagagacagctgcacgagtacgagaccgagctggaggacgagagaaagcagagagccctggccgccgccgccaagaagaagctggagggcgacctgaaggacctggagctgcaggccgacagcgccatcaagggcagagaggaggccatcaagcagctgagaaagctgcaggcccagatgaaggacttccagagagagctggaggacgccagagccagcagagacgagatcttcgccaccgccaaggagaacgagaagaaggccaagagcctggaggccgacctgatgcagctgcaggaggacctggccgccgccgagagagccagaaagcaggccgacctggagaaggaggagctggccgaggagctggccagcagcctgagcggcagaaacgccctgcaggacgagaagagaagactggaggccagaatcgcccagctggaggaggagctggaggaggagcagggcaacatggaggccatgagcgacagagtgagaaaggccacccagcaggccgagcagctgagcaacgagctggccaccgagagaagcaccgcccagaagaacgagagcgccagacagcagctggagagacagaacaaggagctgagaagcaagctgcacgagatggagggcgccgtgaagagcaagttcaagagcaccatcgccgccctggaggccaagatcgcccagctggaggagcaggtggagcaggaggccagagagaagcaggccgccaccaagagcctgaagcagaaggacaagaagctgaaggagatcctgctgcaggtggaggacgagagaaagatggccgagcagtacaaggagcaggccgagaagggcaacgccagagtgaagcagctgaagagacagctggaggaggccgaggaggagagccagagaatcaacgccaacagaagaaagctgcagagagagctggacgaggccaccgagagcaacgaggccatgggcagagaggtgaacgccctgaagagcaagctgagaagaggcaacgagaccagcttcgtgcccagcagaagaagcggcggcagaagagtgatcgagaacgccgacggcagcgaggaggagaccgacaccagagacgccgacttcaacggcaccaaggccagcgag

SEQ ID NO: 623 - RNA, 1053 nt, synthetic construct
  misc_feature 1..1053: note = Homo sapiens__P35749-1__SMMHC(1527-1877) CDS opt4
  source 1..1053: mol_type = other RNA
gtgcacgagctggagaagagcaagagagccctggagacccagatggaggagatgaagacccagctggaggagctggaggacgagctgcaggccaccgaggacgccaagctgagactggaggtgaacatgcaggccctgaagggccagttcgagagagacctgcaggccagagacgagcagaacgaggagaagagaagacagctgcagagacagctgcacgagtacgagaccgagctggaggacgagagaaagcagagagccctggccgccgccgccaagaagaagctggagggcgacctgaaggacctggagctgcaggccgacagcgccatcaagggcagagaggaggccatcaagcagctgagaaagctgcaggcccagatgaaggacttccagagagagctggaggacgccagagccagcagagacgagatcttcgccaccgccaaggagaacgagaagaaggccaagagcctggaggccgacctgatgcagctgcaggaggacctggccgccgccgagagagccagaaagcaggccgacctggagaaggaggagctggccgaggagctggccagcagcctgagcggcagaaacgccctgcaggacgagaagagaagactggaggccagaatcgcccagctggaggaggagctggaggaggagcagggcaacatggaggccatgagcgacagagtgagaaaggccacccagcaggccgagcagctgagcaacgagctggccaccgagagaagcaccgcccagaagaacgagagcgccagacagcagctggagagacagaacaaggagctgagaagcaagctgcacgagatggagggcgccgtgaagagcaagttcaagagcaccatcgccgccctggaggccaagatcgcccagctggaggagcaggtggagcaggaggccagagagaagcaggccgccaccaagagcctgaagcagaaggacaagaagctgaaggagatcctgctgcaggtggaggacgagagaaagatggccgagcagtacaaggagcaggccgagaagggcaacgcc

SEQ ID NO: 624 - RNA, 492 nt, synthetic construct
  misc_feature 1..492: note = Homo sapiens__P35749-1__SMMHC(1809-1972) CDS opt4
  source 1..492: mol_type = other RNA
aagagcaagttcaagagcaccatcgccgccctggaggccaagatcgcccagctggaggagcaggtggagcaggaggccagagagaagcaggccgccaccaagagcctgaagcagaaggacaagaagctgaaggagatcctgctgcaggtggaggacgagagaaagatggccgagcagtacaaggagcaggccgagaagggcaacgccagagtgaagcagctgaagagacagctggaggaggccgaggaggagagccagagaatcaacgccaacagaagaaagctgcagagagagctggacgaggccaccgagagcaacgaggccatgggcagagaggtgaacgccctgaagagcaagctgagaagaggcaacgagaccagcttcgtgcccagcagaagaagcggcggcagaagagtgatcgagaacgccgacggcagcgaggaggagaccgacaccagagacgccgacttcaacggcaccaaggccagcgag

SEQ ID NO: 625 - RNA, 207 nt, synthetic construct
  misc_feature 1..207: note = Homo sapiens__P35749-1__SMMHC(1809-1877) CDS opt4
  source 1..207: mol_type = other RNA
aagagcaagttcaagagcaccatcgccgccctggaggccaagatcgcccagctggaggagcaggtggagcaggaggccagagagaagcaggccgccaccaagagcctgaagcagaaggacaagaagctgaaggagatcctgctgcaggtggaggacgagagaaagatggccgagcagtacaaggagcaggccgagaagggcaacgcc

SEQ ID NO: 626 - RNA, 69 nt, synthetic construct
  misc_feature 1..69: note = Artificial____Lifeact CDS opt4
  source 1..69: mol_type = other RNA
ggcgtggccgacctgatcaagaagttcgagagcatcagcaaggaggagggcgacccccccgtggccacc

SEQ ID NO: 627 - RNA, 51 nt, synthetic construct
  misc_feature 1..51: note = Saccharomyces cerevisiae S288C__NP_014882.4__Lifeact(1-17) CDS opt4
  source 1..51: mol_type = other RNA
atgggcgtggccgacctgatcaagaagttcgagagcatcagcaaggaggag

SEQ ID NO: 628 - RNA, 2481 nt, synthetic construct
  misc_feature 1..2481: note = Homo sapiens__Q16665-1__HIF1alpha CDS opt4
  source 1..2481: mol_type = other RNA
atggagggcgccggcggcgccaacgacaagaagaagatcagcagcgagagaagaaaggagaagagcagagacgccgccagaagcagaagaagcaaggagagcgaggtgttctacgagctggcccaccagctgcccctgccccacaacgtgagcagccacctggacaaggccagcgtgatgagactgaccatcagctacctgagagtgagaaagctgctggacgccggcgacctggacatcgaggacgacatgaaggcccagatgaactgcttctacctgaaggccctggacggcttcgtgatggtgctgaccgacgacggcgacatgatctacatcagcgacaacgtgaacaagtacatgggcctgacccagttcgagctgaccggccacagcgtgttcgacttcacccacccctgcgaccacgaggagatgagagagatgctgacccacagaaacggcctggtgaagaagggcaaggagcagaacacccagagaagcttcttcctgagaatgaagtgcaccctgaccagcagaggcagaaccatgaacatcaagagcgccacctggaaggtgctgcactgcaccggccacatccacgtgtacgacaccaacagcaaccagccccagtgcggctacaagaagccccccatgacctgcctggtgctgatctgcgagcccatcccccaccccagcaacatcgagatccccctggacagcaagaccttcctgagcagacacagcctggacatgaagttcagctactgcgacgagagaatcaccgagctgatgggctacgagcccgaggagctgctgggcagaagcatctacgagtactaccacgccctggacagcgaccacctgaccaagacccaccacgacatgttcaccaagggccaggtgaccaccggccagtacagaatgctggccaagagaggcggctacgtgtgggtggagacccaggccaccgtgatctacaacaccaagaacagccagccccagtgcatcgtgtgcgtgaactacgtggtgagcggcatcatccagcacgacctgatcttcagcctgcagcagaccgagtgcgtgctgaagcccgtggagagcagcgacatgaagatgacccagctgttcaccaaggtggagagcgaggacaccagcagcctgttcgacaagctgaagaaggagcccgacgccctgaccctgctggcccccgccgccggcgacaccatcatcagcctggacttcggcagcaacgacaccgagaccgacgaccagcagctggaggaggtgcccctgtacaacgacgtgatgctgcccagccccaacgagaagctgcagaacatcaacctggccatgagccccctgcccaccgccgagacccccaagcccctgagaagcagcgccgaccccgccctgaaccaggaggtggccctgaagctggagcccaaccccgagagcctggagctgagcttcaccatgccccagatccaggaccagacccccagccccagcgacggcagcaccagacagagcagccccgagcccaacagccccagcgagtactgcttctacgtggacagcgacatggtgaacgagttcaagctggagctggtggagaagctgttcgccgaggacaccgaggccaagaaccccttcagcacccaggacaccgacctggacctggagatgctggccccctacatccccatggacgacgacttccagctgagaagcttcgaccagctgagccccctggagagcagcagcgccagccccgagagcgccagcccccagagcaccgtgaccgtgttccagcagacccagatccaggagcccaccgccaacgccaccaccaccaccgccaccaccgacgagctgaagaccgtgaccaaggacagaatggaggacatcaagatcctgatcgccagccccagccccacccacatccacaaggagaccaccagcgccaccagcagcccctacagagacacccagagcagaaccgccagccccaacagagccggcaagggcgtgatcgagcagaccgagaagagccaccccagaagccccaacgtgctgagcgtggccctgagccagagaaccaccgtgcccgaggaggagctgaaccccaagatcctggccctgcagaacgcccagagaaagagaaagatggagcacgacggcagcctgttccaggccgtgggcatcggcaccctgctgcagcagcccgacgaccacgccgccaccaccagcctgagctggaagagagtgaagggctgcaagagcagcgagcagaacggcatggagcagaagaccatcatcctgatccccagcgacctggcctgcagactgctgggccagagcatggacgagagcggcctgccccagctgaccagctacgactgcgaggtgaacgcccccatccagggcagcagaaacctgctgcagggcgaggagctgctgagagccctggaccaggtgaactga

SEQ ID NO: 629 - RNA, 81 nt, synthetic construct
  misc_feature 1..81: note = Homo sapiens__Q16665-1__HIF1alpha(549-575) CDS opt4
  source 1..81: mol_type = other RNA
cccttcagcacccaggacaccgacctggacctggagatgctggccccctacatccccatggacgacgacttccagctgaga

SEQ ID NO: 630 - RNA, 45 nt, synthetic construct
  misc_feature 1..45: note = Artificial____Linker CDS opt4
  source 1..45: mol_type = other RNA
ggcggcagcggcggcagcggcggcagcggcggcagcggcggcggc

SEQ ID NO: 631 - RNA, 1362 nt, synthetic construct
  misc_feature 1..1362: note = Homo sapiens__Q01196-1__RUNX1(K83E_R174Q) CDS opt4
  source 1..1362: mol_type = other RNA
atgagaatccccgtggacgccagcaccagcagaagattcaccccccccagcaccgccctgagccccggcaagatgagcgaggccctgcccctgggcgcccccgacgccggcgccgccctggccggcaagctgagaagcggcgacagaagcatggtggaggtgctggccgaccaccccggcgagctggtgagaaccgacagccccaacttcctgtgcagcgtgctgcccacccactggagatgcaacgagaccctgcccatcgccttcaaggtggtggccctgggcgacgtgcccgacggcaccctggtgaccgtgatggccggcaacgacgagaactacagcgccgagctgagaaacgccaccgccgccatgaagaaccaggtggccagattcaacgacctgagattcgtgggcagaagcggcagaggcaagagcttcaccctgaccatcaccgtgttcaccaaccccccccaggtggccacctaccacagagccatcaagatcaccgtggacggcccccaggagcccagaagacacagacagaagctggacgaccagaccaagcccggcagcctgagcttcagcgagagactgagcgagctggagcagctgagaagaaccgccatgagagtgagcccccaccaccccgcccccacccccaaccccagagccagcctgaaccacagcaccgccttcaacccccagccccagagccagatgcaggacaccagacagatccagcccagccccccctggagctacgaccagagctaccagtacctgggcagcatcgccagccccagcgtgcaccccgccacccccatcagccccggcagagccagcggcatgaccaccctgagcgccgagctgagcagcagactgagcaccgcccccgacctgaccgccttcagcgaccccagacagttccccgccctgcccagcatcagcgaccccagaatgcactaccccggcgccttcacctacagccccacccccgtgaccagcggcatcggcatcggcatgagcgccatgggcagcgccaccagataccacacctacctgccccccccctaccccggcagcagccaggcccagggcggccccttccaggccagcagccccagctaccacctgtactacggcgccagcgccggcagctaccagttcagcatggtgggcggcgagagaagcccccccagaatcctgcccccctgcaccaacgccagcaccggcagcgccctgctgaaccccagcctgcccaaccagagcgacgtggtggaggccgagggcagccacagcaacagccccaccaacatggcccccagcgccagactggaggaggccgtgtggagaccctactga

SEQ ID NO: 632 - RNA, 1362 nt, synthetic construct
  misc_feature 1..1362: note = Homo sapiens__Q01196-1__RUNX1 CDS opt4
  source 1..1362: mol_type = other RNA
atgagaatccccgtggacgccagcaccagcagaagattcaccccccccagcaccgccctgagccccggcaagatgagcgaggccctgcccctgggcgcccccgacgccggcgccgccctggccggcaagctgagaagcggcgacagaagcatggtggaggtgctggccgaccaccccggcgagctggtgagaaccgacagccccaacttcctgtgcagcgtgctgcccacccactggagatgcaacaagaccctgcccatcgccttcaaggtggtggccctgggcgacgtgcccgacggcaccctggtgaccgtgatggccggcaacgacgagaactacagcgccgagctgagaaacgccaccgccgccatgaagaaccaggtggccagattcaacgacctgagattcgtgggcagaagcggcagaggcaagagcttcaccctgaccatcaccgtgttcaccaaccccccccaggtggccacctaccacagagccatcaagatcaccgtggacggccccagagagcccagaagacacagacagaagctggacgaccagaccaagcccggcagcctgagcttcagcgagagactgagcgagctggagcagctgagaagaaccgccatgagagtgagcccccaccaccccgcccccacccccaaccccagagccagcctgaaccacagcaccgccttcaacccccagccccagagccagatgcaggacaccagacagatccagcccagccccccctggagctacgaccagagctaccagtacctgggcagcatcgccagccccagcgtgcaccccgccacccccatcagccccggcagagccagcggcatgaccaccctgagcgccgagctgagcagcagactgagcaccgcccccgacctgaccgccttcagcgaccccagacagttccccgccctgcccagcatcagcgaccccagaatgcactaccccggcgccttcacctacagccccacccccgtgaccagcggcatcggcatcggcatgagcgccatgggcagcgccaccagataccacacctacctgccccccccctaccccggcagcagccaggcccagggcggccccttccaggccagcagccccagctaccacctgtactacggcgccagcgccggcagctaccagttcagcatggtgggcggcgagagaagcccccccagaatcctgcccccctgcaccaacgccagcaccggcagcgccctgctgaaccccagcctgcccaaccagagcgacgtggtggaggccgagggcagccacagcaacagccccaccaacatggcccccagcgccagactggaggaggccgtgtggagaccctactga

SEQ ID NO: 633 - RNA, 1443 nt, synthetic construct
  misc_feature 1..1443: note = Homo sapiens__Q01196-8__RUNX1 CDS opt4
  source 1..1443: mol_type = other RNA
atggccagcgacagcatcttcgagagcttccccagctacccccagtgcttcatgagagagtgcatcctgggcatgaaccccagcagagacgtgcacgacgccagcaccagcagaagattcaccccccccagcaccgccctgagccccggcaagatgagcgaggccctgcccctgggcgcccccgacgccggcgccgccctggccggcaagctgagaagcggcgacagaagcatggtggaggtgctggccgaccaccccggcgagctggtgagaaccgacagccccaacttcctgtgcagcgtgctgcccacccactggagatgcaacaagaccctgcccatcgccttcaaggtggtggccctgggcgacgtgcccgacggcaccctggtgaccgtgatggccggcaacgacgagaactacagcgccgagctgagaaacgccaccgccgccatgaagaaccaggtggccagattcaacgacctgagattcgtgggcagaagcggcagaggcaagagcttcaccctgaccatcaccgtgttcaccaaccccccccaggtggccacctaccacagagccatcaagatcaccgtggacggccccagagagcccagaagacacagacagaagctggacgaccagaccaagcccggcagcctgagcttcagcgagagactgagcgagctggagcagctgagaagaaccgccatgagagtgagcccccaccaccccgcccccacccccaaccccagagccagcctgaaccacagcaccgccttcaacccccagccccagagccagatgcaggacaccagacagatccagcccagccccccctggagctacgaccagagctaccagtacctgggcagcatcgccagccccagcgtgcaccccgccacccccatcagccccggcagagccagcggcatgaccaccctgagcgccgagctgagcagcagactgagcaccgcccccgacctgaccgccttcagcgaccccagacagttccccgccctgcccagcatcagcgaccccagaatgcactaccccggcgccttcacctacagccccacccccgtgaccagcggcatcggcatcggcatgagcgccatgggcagcgccaccagataccacacctacctgccccccccctaccccggcagcagccaggcccagggcggccccttccaggccagcagccccagctaccacctgtactacggcgccagcgccggcagctaccagttcagcatggtgggcggcgagagaagcccccccagaatcctgcccccctgcaccaacgccagcaccggcagcgccctgctgaaccccagcctgcccaaccagagcgacgtggtggaggccgagggcagccacagcaacagccccaccaacatggcccccagcgccagactggaggaggccgtgtggagaccctactga

SEQ ID NO: 634 - RNA, 1419 nt, synthetic construct
  misc_feature 1..1419: note = Homo sapiens__Q01196-2__RUNX1 CDS opt4
  source 1..1419: mol_type = other RNA
atgagaatccccgtggacgccagcaccagcagaagattcaccccccccagcaccgccctgagccccggcaagatgagcgaggccctgcccctgggcgcccccgacgccggcgccgccctggccggcaagctgagaagcggcgacagaagcatggtggaggtgctggccgaccaccccggcgagctggtgagaaccgacagccccaacttcctgtgcagcgtgctgcccacccactggagatgcaacaagaccctgcccatcgccttcaaggtggtggccctgggcgacgtgcccgacggcaccctggtgaccgtgatggccggcaacgacgagaactacagcgccgagctgagaaacgccaccgccgccatgaagaaccaggtggccagattcaacgacctgagattcgtgggcagaagcggcagaggcaagagcttcaccctgaccatcaccgtgttcaccaaccccccccaggtggccacctaccacagagccatcaagatcaccgtggacggccccagagagcccagaagacacagacagaagctggacgaccagaccaagcccggcagcctgagcttcagcgagagactgagcgagctggagcagctgagaagaaccgccatgagagtgagcccccaccaccccgcccccacccccaaccccagagccagcctgaaccacagcaccgccttcaacccccagccccagagccagatgcaggacaccagacagatccagcccagccccccctggagctacgaccagagctaccagtacctgggcagcatcgccagccccagcgtgcaccccgccacccccatcagccccggcagagccagcggcatgaccaccctgagcgccgagctgagcagcagactgagcaccgcccccgacctgaccgccttcagcgaccccagacagttccccgccctgcccagcatcagcgaccccagaatgcactaccccggcgccttcacctacagccccacccccgtgaccagcggcatcggcatcggcatgagcgccatgggcagcgccaccagataccacacctacctgccccccccctaccccggcagcagccaggcccagggcggccccttccaggccagcagccccagctaccacctgtactacggcgccagcgccggcagctaccagttcagcatggtgggcggcgagagaagcccccccagaatcctgcccccctgcaccaacgccagcaccggcagcgccctgctgaaccccagcctgcccaaccagagcgacgtggtggaggccgagggcagccacagcaacagccccaccaacatgggcggcgccagctgcagcagacaggccagaagagaccccggcccctgggccagaacccccagctggggcagaggcagacccaccgacagaatcagcctgtga

SEQ ID NO: 635 - RNA, 1419 nt, synthetic construct
  misc_feature 1..1419: note = Homo sapiens__CAA56092.1__RUNX1 CDS opt4
  source 1..1419: mol_type = other RNA
atgagaatccccgtggacgccagcaccagcagaagattcaccccccccagcaccgccctgagccccggcaagatgagcgaggccctgcccctgggcgcccccgacgccggcgccgccctggccggcaagctgagaagcggcgacagaagcatggtggaggtgctggccgaccaccccggcgagctggtgagaaccgacagccccaacttcctgtgcagcgtgctgcccacccactggagatgcaacaagaccctgcccatcgccttcaaggtggtggccctgggcgacgtgcccgacggcaccctggtgaccgtgatggccggcaacgacgagaactacagcgccgagctgagaaacgccaccgccgccatgaagaaccaggtggccagattcaacgacctgagattcgtgggcagaagcggcagaggcaagagcttcaccctgaccatcaccgtgttcaccaaccccccccaggtggccacctaccacagagccatcaagatcaccgtggacggccccagagagcccagaagacacagacagaagctggacgaccagaccaagcccggcagcctgagcttcagcgagagactgagcgagctggagcagctgagaagaaccgccatgagagtgagcccccaccaccccgcccccacccccaaccccagagccagcctgaaccacagcaccgccttcaacccccagccccagagccagatgcaggacaccagacagatccagcccagccccccctggagctacgaccagagctaccagtacctgggcagcatcgccagccccagcgtgcaccccgccacccccatcagccccggcagagccagcggcatgaccaccctgagcgccgagctgagcagcagactgagcaccgcccccgacctgaccgccttcagcgaccccagacagttccccgccctgcccagcatcagcgaccccagaatgcactaccccggcgccttcacctacagccccacccccgtgaccagcggcatcggcatcggcatgagcgccatgggcagcgccaccagataccacacctacctgccccccccctaccccggcagcagccaggcccagggcggccccttccaggccagcagccccagctaccacctgtactacggcgccagcgccggcagctaccagttcagcatggtgggcggcgagagaagcccccccagaatcctgcccccctgcaccaacgccagcaccggcagcgccctgctgaaccccagcctgcccaaccagagcgacgtggtggaggccgagggcagacacagaaacagccccaccaacatgggcggcgccagctgcagcagacaggccagaagagaccccggcccctgggccagaacccccagctggggcagaggcagacccaccgacagaatcagcctgtga

SEQ ID NO: 636 - RNA, 1407 nt, synthetic construct
  misc_feature 1..1407: note = Homo sapiens__Q01196-10__RUNX1 CDS opt4
  source 1..1407: mol_type = other RNA
atgcccgccgcccccagaggccccgcccagggcgaggccgccgccagaaccagaagcagagacgccagcaccagcagaagattcaccccccccagcaccgccctgagccccggcaagatgagcgaggccctgcccctgggcgcccccgacgccggcgccgccctggccggcaagctgagaagcggcgacagaagcatggtggaggtgctggccgaccaccccggcgagctggtgagaaccgacagccccaacttcctgtgcagcgtgctgcccacccactggagatgcaacaagaccctgcccatcgccttcaaggtggtggccctgggcgacgtgcccgacggcaccctggtgaccgtgatggccggcaacgacgagaactacagcgccgagctgagaaacgccaccgccgccatgaagaaccaggtggccagattcaacgacctgagattcgtgggcagaagcggcagaggcaagagcttcaccctgaccatcaccgtgttcaccaaccccccccaggtggccacctaccacagagccatcaagatcaccgtggacggccccagagagcccagaagacacagacagaagctggacgaccagaccaagcccggcagcctgagcttcagcgagagactgagcgagctggagcagctgagaagaaccgccatgagagtgagcccccaccaccccgcccccacccccaaccccagagccagcctgaaccacagcaccgccttcaacccccagccccagagccagatgcaggacaccagacagatccagcccagccccccctggagctacgaccagagctaccagtacctgggcagcatcgccagccccagcgtgcaccccgccacccccatcagccccggcagagccagcggcatgaccaccctgagcgccgagctgagcagcagactgagcaccgcccccgacctgaccgccttcagcgaccccagacagttccccgccctgcccagcatcagcgaccccagaatgcactaccccggcgccttcacctacagccccacccccgtgaccagcggcatcggcatcggcatgagcgccatgggcagcgccaccagataccacacctacctgccccccccctaccccggcagcagccaggcccagggcggccccttccaggccagcagccccagctaccacctgtactacggcgccagcgccggcagctaccagttcagcatggtgggcggcgagagaagcccccccagaatcctgcccccctgcaccaacgccagcaccggcagcgccctgctgaaccccagcctgcccaaccagagcgacgtggtggaggccgagggcagccacagcaacagccccaccaacatggcccccagcgccagactggaggaggccgtgtggagaccctactga

SEQ ID NO: 637 - RNA, 1371 nt, synthetic construct
  misc_feature 1..1371: note = Homo sapiens__Q01196-9__RUNX1 CDS opt4
  source 1..1371: mol_type = other RNA
atgaaccccagcagagacgtgcacgacgccagcaccagcagaagattcaccccccccagcaccgccctgagccccggcaagatgagcgaggccctgcccctgggcgcccccgacgccggcgccgccctggccggcaagctgagaagcggcgacagaagcatggtggaggtgctggccgaccaccccggcgagctggtgagaaccgacagccccaacttcctgtgcagcgtgctgcccacccactggagatgcaacaagaccctgcccatcgccttcaaggtggtggccctgggcgacgtgcccgacggcaccctggtgaccgtgatggccggcaacgacgagaactacagcgccgagctgagaaacgccaccgccgccatgaagaaccaggtggccagattcaacgacctgagattcgtgggcagaagcggcagaggcaagagcttcaccctgaccatcaccgtgttcaccaaccccccccaggtggccacctaccacagagccatcaagatcaccgtggacggccccagagagcccagaagacacagacagaagctggacgaccagaccaagcccggcagcctgagcttcagcgagagactgagcgagctggagcagctgagaagaaccgccatgagagtgagcccccaccaccccgcccccacccccaaccccagagccagcctgaaccacagcaccgccttcaacccccagccccagagccagatgcaggacaccagacagatccagcccagccccccctggagctacgaccagagctaccagtacctgggcagcatcgccagccccagcgtgcaccccgccacccccatcagccccggcagagccagcggcatgaccaccctgagcgccgagctgagcagcagactgagcaccgcccccgacctgaccgccttcagcgaccccagacagttccccgccctgcccagcatcagcgaccccagaatgcactaccccggcgccttcacctacagccccacccccgtgaccagcggcatcggcatcggcatgagcgccatgggcagcgccaccagataccacacctacctgccccccccctaccccggcagcagccaggcccagggcggccccttccaggccagcagccccagctaccacctgtactacggcgccagcgccggcagctaccagttcagcatggtgggcggcgagagaagcccccccagaatcctgcccccctgcaccaacgccagcaccggcagcgccctgctgaaccccagcctgcccaaccagagcgacgtggtggaggccgagggcagccacagcaacagccccaccaacatggcccccagcgccagactggaggaggccgtgtggagaccctactga

SEQ ID NO: 638 - RNA, 1362 nt, synthetic construct
  misc_feature 1..1362: note = Homo sapiens__AAA51720.1__RUNX1 CDS opt4
  source 1..1362: mol_type = other RNA
atgagaatccccgtggacgccagcaccagcagaagattcaccccccccagcaccgccctgagccccggcaagatgagcgaggccctgcccctgggcgcccccgacgccggcgccgccctggccggcaagctgagaagcggcgacagaagcatggtggaggtgctggccgaccaccccggcgagctggtgagaaccgacagccccaacttcctgtgcagcgtgctgcccacccactggagatgcaacaagaccctgcccatcgccttcaaggtggtggccctgggcgacgtgcccgacggcaccctggtgaccgtgatggccggcaacgacgagaactacagcgccgagctgagaaacgccaccgccgccatgaagaaccaggtggccagattcaacgacctgagattcgtgggcagaagcggcagaggcaagagcttcaccctgaccatcaccgtgttcaccaaccccccccaggtggccacctaccacagagccatcaagatcaccgtggacggccccagagagcccagaagacacagacagaagctggacgaccagaccaagcccggcagcctgagcttcagcgagagactgagcgagctggagcagctgagaagaaccgccatgagagtgagcccccaccaccccgcccccacccccaaccccagagccagcctgaaccacagcaccgccttcaacccccagccccagagccagatgcaggacaccagacagatccagcccagccccccctggagctacgaccagagctaccagtacctgggcagcatcgccagccccagcgtgcaccccgccacccccatcagccccggcagagccagcggcatgaccaccctgagcgccgagctgagcagcagactgagcaccgcccccgacctgaccgccttcagcgaccccagacagttccccgccctgcccagcatcagcgaccccagaatgcactaccccggcgccttcacctacagccccacccccgtgaccagcggcatcggcatcggcatgagcgccatgggcagcgccaccagataccacacctacctgccccccccctaccccggcagcagccaggcccagggcggccccttccaggccagcagccccagctaccacctgtactacggcgccagcgccggcagctaccagttcagcatggtgggcggcgagagaagcccccccagaatcctgcccccctgcaccaacgccagcaccggcttcgccctgctgaaccccagcctgcccaaccagagcgacgtggtggaggccgagggcagccacagcaacagccccaccaacatggcccccagcgccagactggaggaggccgtgtggagaccctactga

SEQ ID NO: 639 - RNA, 1170 nt, synthetic construct
  misc_feature 1..1170: note = Homo sapiens__H9KVB1__RUNX1 CDS opt4
  source 1..1170: mol_type = other RNA
atgagaatccccgtggacgccagcaccagcagaagattcaccccccccagcaccgccctgagccccggcaagatgagcgaggccctgcccctgggcgcccccgacgccggcgccgccctggccggcaagctgagaagcggcgacagaagcatggtggaggtgctggccgaccaccccggcgagctggtgagaaccgacagccccaacttcctgtgcagcgtgctgcccacccactggagatgcaacaagaccctgcccatcgccttcaaggtggtggccctgggcgacgtgcccgacggcaccctggtgaccgtgatggccggcaacgacgagaactacagcgccgagctgagaaacgccaccgccgccatgaagaaccaggtggccagattcaacgacctgagattcgtgggcagaagcggcagaggcaagagcttcaccctgaccatcaccgtgttcaccaaccccccccaggtggccacctaccacagagccatcaagatcaccgtggacggccccagagagcccagaaacaccagacagatccagcccagccccccctggagctacgaccagagctaccagtacctgggcagcatcgccagccccagcgtgcaccccgccacccccatcagccccggcagagccagcggcatgaccaccctgagcgccgagctgagcagcagactgagcaccgcccccgacctgaccgccttcagcgaccccagacagttccccgccctgcccagcatcagcgaccccagaatgcactaccccggcgccttcacctacagccccacccccgtgaccagcggcatcggcatcggcatgagcgccatgggcagcgccaccagataccacacctacctgccccccccctaccccggcagcagccaggcccagggcggccccttccaggccagcagccccagctaccacctgtactacggcgccagcgccggcagctaccagttcagcatggtgggcggcgagagaagcccccccagaatcctgcccccctgcaccaacgccagcaccggcagcgccctgctgaaccccagcctgcccaaccagagcgacgtggtggaggccgagggcagccacagcaacagccccaccaacatggcccccagcgccagactggaggaggccgtgtggagaccctactga

SEQ ID NO: 640 - RNA, 1047 nt, synthetic construct
  misc_feature 1..1047: note = Homo sapiens__Q01196-11__RUNX1 CDS opt4
  source 1..1047: mol_type = other RNA
atggccggcaacgacgagaactacagcgccgagctgagaaacgccaccgccgccatgaagaaccaggtggccagattcaacgacctgagattcgtgggcagaagcggcagaggcaagagcttcaccctgaccatcaccgtgttcaccaaccccccccaggtggccacctaccacagagccatcaagatcaccgtggacggccccagagagcccagaagacacagacagaagctggacgaccagaccaagcccggcagcctgagcttcagcgagagactgagcgagctggagcagctgagaagaaccgccatgagagtgagcccccaccaccccgcccccacccccaaccccagagccagcctgaaccacagcaccgccttcaacccccagccccagagccagatgcaggacaccagacagatccagcccagccccccctggagctacgaccagagctaccagtacctgggcagcatcgccagccccagcgtgcaccccgccacccccatcagccccggcagagccagcggcatgaccaccctgagcgccgagctgagcagcagactgagcaccgcccccgacctgaccgccttcagcgaccccagacagttccccgccctgcccagcatcagcgaccccagaatgcactaccccggcgccttcacctacagccccacccccgtgaccagcggcatcggcatcggcatgagcgccatgggcagcgccaccagataccacacctacctgccccccccctaccccggcagcagccaggcccagggcggccccttccaggccagcagccccagctaccacctgtactacggcgccagcgccggcagctaccagttcagcatggtgggcggcgagagaagcccccccagaatcctgcccccctgcaccaacgccagcaccggcagcgccctgctgaaccccagcctgcccaaccagagcgacgtggtggaggccgagggcagccacagcaacagccccaccaacatggcccccagcgccagactggaggaggccgtgtggagaccctactga

SEQ ID NO: 641 - RNA, 774 nt, synthetic construct
  misc_feature 1..774: note = Homo sapiens__Q01196-4__RUNX1 CDS opt4
  source 1..774: mol_type = other RNA
atgagaatccccgtggacgccagcaccagcagaagattcaccccccccagcaccgccctgagccccggcaagatgagcgaggccctgcccctgggcgcccccgacgccggcgccgccctggccggcaagctgagaagcggcgacagaagcatggtggaggtgctggccgaccaccccggcgagctggtgagaaccgacagccccaacttcctgtgcagcgtgctgcccacccactggagatgcaacaagaccctgcccatcgccttcaaggtggtggccctgggcgacgtgcccgacggcaccctggtgaccgtgatggccggcaacgacgagaactacagcgccgagctgagaaacgccaccgccgccatgaagaaccaggtggccagattcaacgacctgagattcgtgggcagaagcggcagaggcaagagcttcaccctgaccatcaccgtgttcaccaaccccccccaggtggccacctaccacagagccatcaagatcaccgtggacggccccagagagcccagaagacacagacagaagctggacgaccagaccaagcccggcagcctgagcttcagcgagagactgagcgagctggagcagctgagaagaaccgccatgagagtgagcccccaccaccccgcccccacccccaaccccagagccagcctgaaccacagcaccgccttcaacccccagccccagagccagatgcaggacaccagacagatccagcccagccccccctggagctacgaccagagctga

SEQ ID NO: 642 - RNA, 771 nt, synthetic construct
  misc_feature 1..771: note = Homo sapiens__A8MZI9__RUNX1 CDS opt4
  source 1..771: mol_type = other RNA
atgcccgccgcccccagaggccccgcccagggcgaggccgccgccagaaccagaagcagagacgccagcaccagcagaagattcaccccccccagcaccgccctgagccccggcaagatgagcgaggccctgcccctgggcgcccccgacgccggcgccgccctggccggcaagctgagaagcggcgacagaagcatggtggaggtgctggccgaccaccccggcgagctggtgagaaccgacagccccaacttcctgtgcagcgtgctgcccacccactggagatgcaacaagaccctgcccatcgccttcaaggtggtggccctgggcgacgtgcccgacggcaccctggtgaccgtgatggccggcaacgacgagaactacagcgccgagctgagaaacgccaccgccgccatgaagaaccaggtggccagattcaacgacctgagattcgtgggcagaagcggcagaggcaagagcttcaccctgaccatcaccgtgttcaccaaccccccccaggtggccacctaccacagagccatcaagatcaccgtggacggccccagagagcccagaagacacagacagaagctggacgaccagaccaagcccggcagcctgagcttcagcgagagactgagcgagctggagcagctgagaagaaccgccatgagagtgagcccccaccaccccgcccccacccccaaccccagagccagcctgaaccacagcaccgccttcaacccccagccccagagccagatgcagtga

SEQ ID NO: 643 - RNA, 753 nt, synthetic construct
  misc_feature 1..753: note = Homo sapiens__Q01196-3__RUNX1 CDS opt4
  source 1..753: mol_type = other RNA
atgagaatccccgtggacgccagcaccagcagaagattcaccccccccagcaccgccctgagccccggcaagatgagcgaggccctgcccctgggcgcccccgacgccggcgccgccctggccggcaagctgagaagcggcgacagaagcatggtggaggtgctggccgaccaccccggcgagctggtgagaaccgacagccccaacttcctgtgcagcgtgctgcccacccactggagatgcaacaagaccctgcccatcgccttcaaggtggtggccctgggcgacgtgcccgacggcaccctggtgaccgtgatggccggcaacgacgagaactacagcgccgagctgagaaacgccaccgccgccatgaagaaccaggtggccagattcaacgacctgagattcgtgggcagaagcggcagaggcaagagcttcaccctgaccatcaccgtgttcaccaaccccccccaggtggccacctaccacagagccatcaagatcaccgtggacggccccagagagcccagaagacacagacagaagctggacgaccagaccaagcccggcagcctgagcttcagcgagagactgagcgagctggagcagctgagaagaaccgccatgagagtgagcccccaccaccccgcccccacccccaaccccagagccagcctgaaccacagcaccgccttcaacccccagccccagagccagatgcaggaggaggacaccgccccctggagatgctga

SEQ ID NO: 644 - RNA, 729 nt, synthetic construct
  misc_feature 1..729: note = Homo sapiens__Q01196-7__RUNX1 CDS opt4
  source 1..729: mol_type = other RNA
atgagaatccccgtggacgccagcaccagcagaagattcaccccccccagcaccgccctgagccccggcaagatgagcgaggccctgcccctgggcgcccccgacgccggcgccgccctggccggcaagctgagaagcggcgacagaagcatggtggaggtgctggccgaccaccccggcgagctggtgagaaccgacagccccaacttcctgtgcagcgtgctgcccacccactggagatgcaacaagaccctgcccatcgccttcaaggtggtggccctgggcgacgtgcccgacggcaccctggtgaccgtgatggccggcaacgacgagaactacagcgccgagctgagaaacgccaccgccgccatgaagaaccaggtggccagattcaacgacctgagattcgtggacggccccagagagcccagaagacacagacagaagctggacgaccagaccaagcccggcagcctgagcttcagcgagagactgagcgagctggagcagctgagaagaaccgccatgagagtgagcccccaccaccccgcccccacccccaaccccagagccagcctgaaccacagcaccgccttcaacccccagccccagagccagatgcaggacaccagacagatccagcccagccccccctggagctacgaccagagctaccagtacctgggcagcatcgccagccccagcgtgcaccccgccacccccatctga

SEQ ID NO: 645 - RNA, 675 nt, synthetic construct
  misc_feature 1..675: note = Homo sapiens__Q01196-5__RUNX1 CDS opt4
  source 1..675: mol_type = other RNA
atgagaatccccgtggacgccagcaccagcagaagattcaccccccccagcaccgccctgagccccggcaagatgagcgaggccctgcccctgggcgcccccgacgccggcgccgccctggccggcaagctgagaagcggcgacagaagcatggtggaggtgctggccgaccaccccggcgagctggtgagaaccgacagccccaacttcctgtgcagcgtgctgcccacccactggagatgcaacaagaccctgcccatcgccttcaaggtggtggccctgggcgacgtgcccgacggcaccctggtgaccgtgatggccggcaacgacgagaactacagcgccgagctgagaaacgccaccgccgccatgaagaaccaggtggccagattcaacgacctgagattcgtgggcagaagcggcagaggcaagagcttcaccctgaccatcaccgtgttcaccaaccccccccaggtggccacctaccacagagccatcaagatcaccgtggacggccccagagagcccagaagcaagtgcatccacctgggcctggtgcacccccccggctggtacaccctgcaggccggcatcctgagagaccacgtgagcgacagcctgggcagcaccttcccccccggcggctggcaggcccccgtgaagcccaagagctga

SEQ ID NO: 646 - RNA, 567 nt, synthetic construct
  misc_feature 1..567: note = Homo sapiens__Q01196-6__RUNX1 CDS opt4
  source 1..567: mol_type = other RNA
atgagaatccccgtggacgccagcaccagcagaagattcaccccccccagcaccgccctgagccccggcaagatgagcgaggccctgcccctgggcgcccccgacgccggcgccgccctggccggcaagctgagaagcggcgacagaagcatggtggaggtgctggccgaccaccccggcgagctggtgagaaccgacagccccaacttcctgtgcagcgtgctgcccacccactggagatgcaacaagaccctgcccatcgccttcaaggtggtggccctgggcgacgtgcccgacggcaccctggtgaccgtgatggccggcaacgacgagaactacagcgccgagctgagaaacgccaccgccgccatgaagaaccaggtggccagattcaacgacctgagattcgtgggcagaagcggcagaggcaagagcttcaccctgaccatcaccgtgttcaccaaccccccccaggtggccacctaccacagagccatcaagatcaccgtggacggccccagagagcccagaaacagcctgacctggcccagatacccccacatctga

SEQ ID NO: 647 - RNA, 384 nt, synthetic construct
  misc_feature 1..384: note = Homo sapiens__Q01196-1__RUNX1(1-128) CDS opt4
  source 1..384: mol_type = other RNA
atgagaatccccgtggacgccagcaccagcagaagattcaccccccccagcaccgccctgagccccggcaagatgagcgaggccctgcccctgggcgcccccgacgccggcgccgccctggccggcaagctgagaagcggcgacagaagcatggtggaggtgctggccgaccaccccggcgagctggtgagaaccgacagccccaacttcctgtgcagcgtgctgcccacccactggagatgcaacaagaccctgcccatcgccttcaaggtggtggccctgggcgacgtgcccgacggcaccctggtgaccgtgatggccggcaacgacgagaactacagcgccgagctgagaaacgccaccgccgccatgaagaaccaggtg

SEQ ID NO: 648 - RNA, 531 nt, synthetic construct
  misc_feature 1..531: note = Homo sapiens__Q01196-1__RUNX1(1-177) CDS opt4
  source 1..531: mol_type = other RNA
atgagaatccccgtggacgccagcaccagcagaagattcaccccccccagcaccgccctgagccccggcaagatgagcgaggccctgcccctgggcgcccccgacgccggcgccgccctggccggcaagctgagaagcggcgacagaagcatggtggaggtgctggccgaccaccccggcgagctggtgagaaccgacagccccaacttcctgtgcagcgtgctgcccacccactggagatgcaacaagaccctgcccatcgccttcaaggtggtggccctgggcgacgtgcccgacggcaccctggtgaccgtgatggccggcaacgacgagaactacagcgccgagctgagaaacgccaccgccgccatgaagaaccaggtggccagattcaacgacctgagattcgtgggcagaagcggcagaggcaagagcttcaccctgaccatcaccgtgttcaccaaccccccccaggtggccacctaccacagagccatcaagatcaccgtggacggccccagagagcccaga

SEQ ID NO: 649 - RNA, 723 nt, synthetic construct
  misc_feature 1..723: note = Homo sapiens__Q01196-1__RUNX1(1-241) CDS opt4
  source 1..723: mol_type = other RNA
atgagaatccccgtggacgccagcaccagcagaagattcaccccccccagcaccgccctgagccccggcaagatgagcgaggccctgcccctgggcgcccccgacgccggcgccgccctggccggcaagctgagaagcggcgacagaagcatggtggaggtgctggccgaccaccccggcgagctggtgagaaccgacagccccaacttcctgtgcagcgtgctgcccacccactggagatgcaacaagaccctgcccatcgccttcaaggtggtggccctgggcgacgtgcccgacggcaccctggtgaccgtgatggccggcaacgacgagaactacagcgccgagctgagaaacgccaccgccgccatgaagaaccaggtggccagattcaacgacctgagattcgtgggcagaagcggcagaggcaagagcttcaccctgaccatcaccgtgttcaccaaccccccccaggtggccacctaccacagagccatcaagatcaccgtggacggccccagagagcccagaagacacagacagaagctggacgaccagaccaagcccggcagcctgagcttcagcgagagactgagcgagctggagcagctgagaagaaccgccatgagagtgagcccccaccaccccgcccccacccccaaccccagagccagcctgaaccacagcaccgccttcaacccccagccccagagccagatgcag

SEQ ID NO: 650 - RNA, 1815 nt, synthetic construct
  misc_feature 1..1815: note = Homo sapiens__Q06455-1__RUNX1T1a CDS opt4
  source 1..1815: mol_type = other RNA
atgatcagcgtgaagagaaacacctggagagccctgagcctggtgatcggcgactgcagaaagaagggcaacttcgagtactgccaggacagaaccgagaagcacagcaccatgcccgacagccccgtggacgtgaagacccagagcagactgaccccccccaccatgccccccccccccaccacccagggcgcccccagaaccagcagcttcacccccaccaccctgaccaacggcaccagccacagccccaccgccctgaacggcgcccccagcccccccaacggcttcagcaacggccccagcagcagcagcagcagcagcctggccaaccagcagctgccccccgcctgcggcgccagacagctgagcaagctgaagagattcctgaccaccctgcagcagttcggcaacgacatcagccccgagatcggcgagagagtgagaaccctggtgctgggcctggtgaacagcaccctgaccatcgaggagttccacagcaagctgcaggaggccaccaacttccccctgagacccttcgtgatccccttcctgaaggccaacctgcccctgctgcagagagagctgctgcactgcgccagactggccaagcagaaccccgcccagtacctggcccagcacgagcagctgctgctggacgccagcaccaccagccccgtggacagcagcgagctgctgctggacgtgaacgagaacggcaagagaagaacccccgacagaaccaaggagaacggcttcgacagagagcccctgcacagcgagcaccccagcaagagaccctgcaccatcagccccggccagagatacagccccaacaacggcctgagctaccagcccaacggcctgccccaccccacccccccccccccccagcactacagactggacgacatggccatcgcccaccactacagagacagctacagacaccccagccacagagacctgagagacagaaacagacccatgggcctgcacggcaccagacaggaggagatgatcgaccacagactgaccgacagagagtgggccgaggagtggaagcacctggaccacctgctgaactgcatcatggacatggtggagaagaccagaagaagcctgaccgtgctgagaagatgccaggaggccgacagagaggagctgaactactggatcagaagatacagcgacgccgaggacctgaagaagggcggcggcagcagcagcagccacagcagacagcagagccccgtgaaccccgaccccgtggccctggacgcccacagagagttcctgcacagacccgccagcggctacgtgcccgaggagatctggaagaaggccgaggaggccgtgaacgaggtgaagagacaggccatgaccgagctgcagaaggccgtgagcgaggccgagagaaaggcccacgacatgatcaccaccgagagagccaagatggagagaaccgtggccgaggccaagagacaggccgccgaggacgccctggccgtgatcaaccagcaggaggacagcagcgagagctgctggaactgcggcagaaaggccagcgagacctgcagcggctgcaacaccgccagatactgcggcagcttctgccagcacaaggactgggagaagcaccaccacatctgcggccagaccctgcaggcccagcagcagggcgacacccccgccgtgagcagcagcgtgacccccaacagcggcgccggcagccccatggacaccccccccgccgccacccccagaagcaccacccccggcacccccagcaccatcgagaccacccccagatga

SEQ ID NO: 651 - RNA, 1992 nt, synthetic construct
  misc_feature 1..1992: note = Homo sapiens__A0A0A0MSU1__RUNX1T1a CDS opt4
  source 1..1992: mol_type = other RNA
atgtgccaccccgacaaggccttcaccagcgacaagctgcagtgcgtgttcaacgagtacaaggccgccgtgtgggtgccccccagacccagacccctgagcagagcccccctgcccgaggccggcggcgagaacctgcacctgaagatcagcagagtgagaaagagaaacctgcccttcgtggtgtggggcgaggaggaggccagcacccccggcctggacgccatcagccaccacctgtgctaccccgacagaacccacagagacagaaccgagaagcacagcaccatgcccgacagccccgtggacgtgaagacccagagcagactgaccccccccaccatgccccccccccccaccacccagggcgcccccagaaccagcagcttcacccccaccaccctgaccaacggcaccagccacagccccaccgccctgaacggcgcccccagcccccccaacggcttcagcaacggccccagcagcagcagcagcagcagcctggccaaccagcagctgccccccgcctgcggcgccagacagctgagcaagctgaagagattcctgaccaccctgcagcagttcggcaacgacatcagccccgagatcggcgagagagtgagaaccctggtgctgggcctggtgaacagcaccctgaccatcgaggagttccacagcaagctgcaggaggccaccaacttccccctgagacccttcgtgatccccttcctgaaggccaacctgcccctgctgcagagagagctgctgcactgcgccagactggccaagcagaaccccgcccagtacctggcccagcacgagcagctgctgctggacgccagcaccaccagccccgtggacagcagcgagctgctgctggacgtgaacgagaacggcaagagaagaacccccgacagaaccaaggagaacggcttcgacagagagcccctgcacagcgagcaccccagcaagagaccctgcaccatcagccccggccagagatacagccccaacaacggcctgagctaccagcccaacggcctgccccaccccacccccccccccccccagcactacagactggacgacatggccatcgcccaccactacagagacagctacagacaccccagccacagagacctgagagacagaaacagacccatgggcctgcacggcaccagacaggaggagatgatcgaccacagactgaccgacagagagtgggccgaggagtggaagcacctggaccacctgctgaactgcatcatggacatggtggagaagaccagaagaagcctgaccgtgctgagaagatgccaggaggccgacagagaggagctgaactactggatcagaagatacagcgacgccgaggacctgaagaagggcggcggcagcagcagcagccacagcagacagcagagccccgtgaaccccgaccccgtggccctggacgcccacagagagttcctgcacagacccgccagcggctacgtgcccgaggagatctggaagaaggccgaggaggccgtgaacgaggtgaagagacaggccatgaccgagctgcagaaggccgtgagcgaggccgagagaaaggcccacgacatgatcaccaccgagagagccaagatggagagaaccgtggccgaggccaagagacaggccgccgaggacgccctggccgtgatcaaccagcaggaggacagcagcgagagctgctggaactgcggcagaaaggccagcgagacctgcagcggctgcaacaccgccagatactgcggcagcttctgccagcacaaggactgggagaagcaccaccacatctgcggccagaccctgcaggcccagcagcagggcgacacccccgccgtgagcagcagcgtgacccccaacagcggcgccggcagccccatggacaccccccccgccgccacccccagaagcaccacccccggcacccccagcaccatcgagaccacccccagatga

SEQ ID NO: 652 - RNA, 1848 nt, synthetic construct
  misc_feature 1..1848: note = Homo sapiens__Q06455-3__RUNX1T1a CDS opt4
  source 1..1848: mol_type = other RNA
atgtgccaccccgacaaggccttcaccagcgacaagctgcagtgcgtgttcaacgagtacaaggccgccgtgtgggtgccccccagacccagacccctgagcagagcccccctgcccgaggacagaaccgagaagcacagcaccatgcccgacagccccgtggacgtgaagacccagagcagactgaccccccccaccatgccccccccccccaccacccagggcgcccccagaaccagcagcttcacccccaccaccctgaccaacggcaccagccacagccccaccgccctgaacggcgcccccagcccccccaacggcttcagcaacggccccagcagcagcagcagcagcagcctggccaaccagcagctgccccccgcctgcggcgccagacagctgagcaagctgaagagattcctgaccaccctgcagcagttcggcaacgacatcagccccgagatcggcgagagagtgagaaccctggtgctgggcctggtgaacagcaccctgaccatcgaggagttccacagcaagctgcaggaggccaccaacttccccctgagacccttcgtgatccccttcctgaaggccaacctgcccctgctgcagagagagctgctgcactgcgccagactggccaagcagaaccccgcccagtacctggcccagcacgagcagctgctgctggacgccagcaccaccagccccgtggacagcagcgagctgctgctggacgtgaacgagaacggcaagagaagaacccccgacagaaccaaggagaacggcttcgacagagagcccctgcacagcgagcaccccagcaagagaccctgcaccatcagccccggccagagatacagccccaacaacggcctgagctaccagcccaacggcctgccccaccccacccccccccccccccagcactacagactggacgacatggccatcgcccaccactacagagacagctacagacaccccagccacagagacctgagagacagaaacagacccatgggcctgcacggcaccagacaggaggagatgatcgaccacagactgaccgacagagagtgggccgaggagtggaagcacctggaccacctgctgaactgcatcatggacatggtggagaagaccagaagaagcctgaccgtgctgagaagatgccaggaggccgacagagaggagctgaactactggatcagaagatacagcgacgccgaggacctgaagaagggcggcggcagcagcagcagccacagcagacagcagagccccgtgaaccccgaccccgtggccctggacgcccacagagagttcctgcacagacccgccagcggctacgtgcccgaggagatctggaagaaggccgaggaggccgtgaacgaggtgaagagacaggccatgaccgagctgcagaaggccgtgagcgaggccgagagaaaggcccacgacatgatcaccaccgagagagccaagatggagagaaccgtggccgaggccaagagacaggccgccgaggacgccctggccgtgatcaaccagcaggaggacagcagcgagagctgctggaactgcggcagaaaggccagcgagacctgcagcggctgcaacaccgccagatactgcggcagcttctgccagcacaaggactgggagaagcaccaccacatctgcggccagaccctgcaggcccagcagcagggcgacacccccgccgtgagcagcagcgtgacccccaacagcggcgccggcagccccatggacaccccccccgccgccacccccagaagcaccacccccggcacccccagcaccatcgagaccacccccagatga

SEQ ID NO: 653 - RNA, 1755 nt, synthetic construct
  misc_feature 1..1755: note = Homo sapiens__A0A087WWT6__RUNX1T1a CDS opt4
  source 1..1755: mol_type = other RNA
atggtgggcctgagcggccccgtgcagtacagaaccgagaagcacagcaccatgcccgacagccccgtggacgtgaagacccagagcagactgaccccccccaccatgccccccccccccaccacccagggcgcccccagaaccagcagcttcacccccaccaccctgaccaacggcaccagccacagccccaccgccctgaacggcgcccccagcccccccaacggcttcagcaacggccccagcagcagcagcagcagcagcctggccaaccagcagctgccccccgcctgcggcgccagacagctgagcaagctgaagagattcctgaccaccctgcagcagttcggcaacgacatcagccccgagatcggcgagagagtgagaaccctggtgctgggcctggtgaacagcaccctgaccatcgaggagttccacagcaagctgcaggaggccaccaacttccccctgagacccttcgtgatccccttcctgaaggccaacctgcccctgctgcagagagagctgctgcactgcgccagactggccaagcagaaccccgcccagtacctggcccagcacgagcagctgctgctggacgccagcaccaccagccccgtggacagcagcgagctgctgctggacgtgaacgagaacggcaagagaagaacccccgacagaaccaaggagaacggcttcgacagagagcccctgcacagcgagcaccccagcaagagaccctgcaccatcagccccggccagagatacagccccaacaacggcctgagctaccagcccaacggcctgccccaccccacccccccccccccccagcactacagactggacgacatggccatcgcccaccactacagagacagctacagacaccccagccacagagacctgagagacagaaacagacccatgggcctgcacggcaccagacaggaggagatgatcgaccacagactgaccgacagagagtgggccgaggagtggaagcacctggaccacctgctgaactgcatcatggacatggtggagaagaccagaagaagcctgaccgtgctgagaagatgccaggaggccgacagagaggagctgaactactggatcagaagatacagcgacgccgaggacctgaagaagggcggcggcagcagcagcagccacagcagacagcagagccccgtgaaccccgaccccgtggccctggacgcccacagagagttcctgcacagacccgccagcggctacgtgcccgaggagatctggaagaaggccgaggaggccgtgaacgaggtgaagagacaggccatgaccgagctgcagaaggccgtgagcgaggccgagagaaaggcccacgacatgatcaccaccgagagagccaagatggagagaaccgtggccgaggccaagagacaggccgccgaggacgccctggccgtgatcaaccagcaggaggacagcagcgagagctgctggaactgcggcagaaaggccagcgagacctgcagcggctgcaacaccgccagatactgcggcagcttctgccagcacaaggactgggagaagcaccaccacatctgcggccagaccctgcaggcccagcagcagggcgacacccccgccgtgagcagcagcgtgacccccaacagcggcgccggcagccccatggacaccccccccgccgccacccccagaagcaccacccccggcacccccagcaccatcgagaccacccccagatga

SEQ ID NO: 654 - RNA, 1734 nt, synthetic construct
  misc_feature 1..1734: note = Homo sapiens__Q06455-2__RUNX1T1a CDS opt4
  source 1..1734: mol_type = other RNA
atgcccgacagaaccgagaagcacagcaccatgcccgacagccccgtggacgtgaagacccagagcagactgaccccccccaccatgccccccccccccaccacccagggcgcccccagaaccagcagcttcacccccaccaccctgaccaacggcaccagccacagccccaccgccctgaacggcgcccccagcccccccaacggcttcagcaacggccccagcagcagcagcagcagcagcctggccaaccagcagctgccccccgcctgcggcgccagacagctgagcaagctgaagagattcctgaccaccctgcagcagttcggcaacgacatcagccccgagatcggcgagagagtgagaaccctggtgctgggcctggtgaacagcaccctgaccatcgaggagttccacagcaagctgcaggaggccaccaacttccccctgagacccttcgtgatccccttcctgaaggccaacctgcccctgctgcagagagagctgctgcactgcgccagactggccaagcagaaccccgcccagtacctggcccagcacgagcagctgctgctggacgccagcaccaccagccccgtggacagcagcgagctgctgctggacgtgaacgagaacggcaagagaagaacccccgacagaaccaaggagaacggcttcgacagagagcccctgcacagcgagcaccccagcaagagaccctgcaccatcagccccggccagagatacagccccaacaacggcctgagctaccagcccaacggcctgccccaccccacccccccccccccccagcactacagactggacgacatggccatcgcccaccactacagagacagctacagacaccccagccacagagacctgagagacagaaacagacccatgggcctgcacggcaccagacaggaggagatgatcgaccacagactgaccgacagagagtgggccgaggagtggaagcacctggaccacctgctgaactgcatcatggacatggtggagaagaccagaagaagcctgaccgtgctgagaagatgccaggaggccgacagagaggagctgaactactggatcagaagatacagcgacgccgaggacctgaagaagggcggcggcagcagcagcagccacagcagacagcagagccccgtgaaccccgaccccgtggccctggacgcccacagagagttcctgcacagacccgccagcggctacgtgcccgaggagatctggaagaaggccgaggaggccgtgaacgaggtgaagagacaggccatgaccgagctgcagaaggccgtgagcgaggccgagagaaaggcccacgacatgatcaccaccgagagagccaagatggagagaaccgtggccgaggccaagagacaggccgccgaggacgccctggccgtgatcaaccagcaggaggacagcagcgagagctgctggaactgcggcagaaaggccagcgagacctgcagcggctgcaacaccgccagatactgcggcagcttctgccagcacaaggactgggagaagcaccaccacatctgcggccagaccctgcaggcccagcagcagggcgacacccccgccgtgagcagcagcgtgacccccaacagcggcgccggcagccccatggacaccccccccgccgccacccccagaagcaccacccccggcacccccagcaccatcgagaccacccccagatga

SEQ ID NO: 655 - RNA, 1704 nt, synthetic construct
  misc_feature 1..1704: note = Homo sapiens__Q06455-4__RUNX1T1a CDS opt4
  source 1..1704: mol_type = other RNA
atgcccgacagccccgtggacgtgaagacccagagcagactgaccccccccaccatgccccccccccccaccacccagggcgcccccagaaccagcagcttcacccccaccaccctgaccaacggcaccagccacagccccaccgccctgaacggcgcccccagcccccccaacggcttcagcaacggccccagcagcagcagcagcagcagcctggccaaccagcagctgccccccgcctgcggcgccagacagctgagcaagctgaagagattcctgaccaccctgcagcagttcggcaacgacatcagccccgagatcggcgagagagtgagaaccctggtgctgggcctggtgaacagcaccctgaccatcgaggagttccacagcaagctgcaggaggccaccaacttccccctgagacccttcgtgatccccttcctgaaggccaacctgcccctgctgcagagagagctgctgcactgcgccagactggccaagcagaaccccgcccagtacctggcccagcacgagcagctgctgctggacgccagcaccaccagccccgtggacagcagcgagctgctgctggacgtgaacgagaacggcaagagaagaacccccgacagaaccaaggagaacggcttcgacagagagcccctgcacagcgagcaccccagcaagagaccctgcaccatcagccccggccagagatacagccccaacaacggcctgagctaccagcccaacggcctgccccaccccacccccccccccccccagcactacagactggacgacatggccatcgcccaccactacagagacagctacagacaccccagccacagagacctgagagacagaaacagacccatgggcctgcacggcaccagacaggaggagatgatcgaccacagactgaccgacagagagtgggccgaggagtggaagcacctggaccacctgctgaactgcatcatggacatggtggagaagaccagaagaagcctgaccgtgctgagaagatgccaggaggccgacagagaggagctgaactactggatcagaagatacagcgacgccgaggacctgaagaagggcggcggcagcagcagcagccacagcagacagcagagccccgtgaaccccgaccccgtggccctggacgcccacagagagttcctgcacagacccgccagcggctacgtgcccgaggagatctggaagaaggccgaggaggccgtgaacgaggtgaagagacaggccatgaccgagctgcagaaggccgtgagcgaggccgagagaaaggcccacgacatgatcaccaccgagagagccaagatggagagaaccgtggccgaggccaagagacaggccgccgaggacgccctggccgtgatcaaccagcaggaggacagcagcgagagctgctggaactgcggcagaaaggccagcgagacctgcagcggctgcaacaccgccagatactgcggcagcttctgccagcacaaggactgggagaagcaccaccacatctgcggccagaccctgcaggcccagcagcagggcgacacccccgccgtgagcagcagcgtgacccccaacagcggcgccggcagccccatggacaccccccccgccgccacccccagaagcaccacccccggcacccccagcaccatcgagaccacccccagatga

SEQ ID NO: 656 - RNA, 1284 nt, synthetic construct
  misc_feature 1..1284: note = Homo sapiens__Q06455-5__RUNX1T1a CDS opt4
  source 1..1284: mol_type = other RNA
atgatcagcgtgaagagaaacacctggagagccctgagcctggtgatcggcgactgcagaaagaagggcaacttcgagtactgccaggacagaaccgagaagcacagcaccatgcccgacagccccgtggacgtgaagacccagagcagactgaccccccccaccatgccccccccccccaccacccagggcgcccccagaaccagcagcttcacccccaccaccctgaccaacggcaccagccacagccccaccgccctgaacggcgcccccagcccccccaacggcttcagcaacggccccagcagcagcagcagcagcagcctggccaaccagcagctgccccccgcctgcggcgccagacagctgagcaagctgaagagattcctgaccaccctgcagcagttcggcaacgacatcagccccgagatcggcgagagagtgagaaccctggtgctgggcctggtgaacagcaccctgaccatcgaggagttccacagcaagctgcaggaggccaccaacttccccctgagacccttcgtgatccccttcctgaaggccaacctgcccctgctgcagagagagctgctgcactgcgccagactggccaagcagaaccccgcccagtacctggcccagcacgagcagctgctgctggacgccagcaccaccagccccgtggacagcagcgagctgctgctggacgtgaacgagaacggcaagagaagaacccccgacagaaccaaggagaacggcttcgacagagagcccctgcacagcgagcaccccagcaagagaccctgcaccatcagccccggccagagatacagccccaacaacggcctgagctaccagcccaacggcctgccccaccccacccccccccccccccagcactacagactggacgacatggccatcgcccaccactacagagacagctacagacaccccagccacagagacctgagagacagaaacagacccatgggcctgcacggcaccagacaggaggagatgatcgaccacagactgaccgacagagagtgggccgaggagtggaagcacctggaccacctgctgaactgcatcatggacatggtggagaagaccagaagaagcctgaccgtgctgagaagatgccaggaggccgacagagaggagctgaactactggatcagaagatacagcgacgccgaggacctgaagaagggcggcggcagcagcagcagccacagcagacagcagagccccgtgaaccccgaccccgtggccctgggctga

SEQ ID NO: 657 - RNA, 1203 nt, synthetic construct
  misc_feature 1..1203: note = Homo sapiens__Q06455-6__RUNX1T1a CDS opt4
  source 1..1203: mol_type = other RNA
atgcccgacagaaccgagaagcacagcaccatgcccgacagccccgtggacgtgaagacccagagcagactgaccccccccaccatgccccccccccccaccacccagggcgcccccagaaccagcagcttcacccccaccaccctgaccaacggcaccagccacagccccaccgccctgaacggcgcccccagcccccccaacggcttcagcaacggccccagcagcagcagcagcagcagcctggccaaccagcagctgccccccgcctgcggcgccagacagctgagcaagctgaagagattcctgaccaccctgcagcagttcggcaacgacatcagccccgagatcggcgagagagtgagaaccctggtgctgggcctggtgaacagcaccctgaccatcgaggagttccacagcaagctgcaggaggccaccaacttccccctgagacccttcgtgatccccttcctgaaggccaacctgcccctgctgcagagagagctgctgcactgcgccagactggccaagcagaaccccgcccagtacctggcccagcacgagcagctgctgctggacgccagcaccaccagccccgtggacagcagcgagctgctgctggacgtgaacgagaacggcaagagaagaacccccgacagaaccaaggagaacggcttcgacagagagcccctgcacagcgagcaccccagcaagagaccctgcaccatcagccccggccagagatacagccccaacaacggcctgagctaccagcccaacggcctgccccaccccacccccccccccccccagcactacagactggacgacatggccatcgcccaccactacagagacagctacagacaccccagccacagagacctgagagacagaaacagacccatgggcctgcacggcaccagacaggaggagatgatcgaccacagactgaccgacagagagtgggccgaggagtggaagcacctggaccacctgctgaactgcatcatggacatggtggagaagaccagaagaagcctgaccgtgctgagaagatgccaggaggccgacagagaggagctgaactactggatcagaagatacagcgacgccgaggacctgaagaagggcggcggcagcagcagcagccacagcagacagcagagccccgtgaaccccgaccccgtggccctgggctga

SEQ ID NO: 658 - RNA, 1722 nt, synthetic construct
  misc_feature 1..1722: note = Homo sapiens__Q06455-1__RUNX1T1a(31-604) CDS opt4
  source 1..1722: mol_type = other RNA
agaaccgagaagcacagcaccatgcccgacagccccgtggacgtgaagacccagagcagactgaccccccccaccatgccccccccccccaccacccagggcgcccccagaaccagcagcttcacccccaccaccctgaccaacggcaccagccacagccccaccgccctgaacggcgcccccagcccccccaacggcttcagcaacggccccagcagcagcagcagcagcagcctggccaaccagcagctgccccccgcctgcggcgccagacagctgagcaagctgaagagattcctgaccaccctgcagcagttcggcaacgacatcagccccgagatcggcgagagagtgagaaccctggtgctgggcctggtgaacagcaccctgaccatcgaggagttccacagcaagctgcaggaggccaccaacttccccctgagacccttcgtgatccccttcctgaaggccaacctgcccctgctgcagagagagctgctgcactgcgccagactggccaagcagaaccccgcccagtacctggcccagcacgagcagctgctgctggacgccagcaccaccagccccgtggacagcagcgagctgctgctggacgtgaacgagaacggcaagagaagaacccccgacagaaccaaggagaacggcttcgacagagagcccctgcacagcgagcaccccagcaagagaccctgcaccatcagccccggccagagatacagccccaacaacggcctgagctaccagcccaacggcctgccccaccccacccccccccccccccagcactacagactggacgacatggccatcgcccaccactacagagacagctacagacaccccagccacagagacctgagagacagaaacagacccatgggcctgcacggcaccagacaggaggagatgatcgaccacagactgaccgacagagagtgggccgaggagtggaagcacctggaccacctgctgaactgcatcatggacatggtggagaagaccagaagaagcctgaccgtgctgagaagatgccaggaggccgacagagaggagctgaactactggatcagaagatacagcgacgccgaggacctgaagaagggcggcggcagcagcagcagccacagcagacagcagagccccgtgaaccccgaccccgtggccctggacgcccacagagagttcctgcacagacccgccagcggctacgtgcccgaggagatctggaagaaggccgaggaggccgtgaacgaggtgaagagacaggccatgaccgagctgcagaaggccgtgagcgaggccgagagaaaggcccacgacatgatcaccaccgagagagccaagatggagagaaccgtggccgaggccaagagacaggccgccgaggacgccctggccgtgatcaaccagcaggaggacagcagcgagagctgctggaactgcggcagaaaggccagcgagacctgcagcggctgcaacaccgccagatactgcggcagcttctgccagcacaaggactgggagaagcaccaccacatctgcggccagaccctgcaggcccagcagcagggcgacacccccgccgtgagcagcagcgtgacccccaacagcggcgccggcagccccatggacaccccccccgccgccacccccagaagcaccacccccggcacccccagcaccatcgagaccacccccaga

SEQ ID NO: 659 - RNA, 1815 nt, synthetic construct
  misc_feature 1..1815: note = Homo sapiens__O43439-1__RUNX1T1b CDS opt4
  source 1..1815: mol_type = other RNA
atggccaaggagagcggcatcagcctgaaggagatccaggtgctggccagacagtggaaggtgggccccgagaagagagtgcccgccatgcccggcagccccgtggaggtgaagatccagagcagaagcagcccccccaccatgccccccctgccccccatcaaccccggcggccccagacccgtgagcttcacccccaccgccctgagcaacggcatcaaccacagcccccccaccctgaacggcgcccccagccccccccagagattcagcaacggccccgccagcagcaccagcagcgccctgaccaaccagcagctgcccgccacctgcggcgccagacagctgagcaagctgaagagattcctgaccaccctgcagcagttcggcaacgacatcagccccgagatcggcgagaaggtgagaaccctggtgctggccctggtgaacagcaccgtgaccatcgaggagttccactgcaagctgcaggaggccaccaacttccccctgagacccttcgtgatccccttcctgaaggccaacctgcccctgctgcagagagagctgctgcactgcgccagagccgccaagcagacccccagccagtacctggcccagcacgagcacctgctgctgaacaccagcatcgccagccccgccgacagcagcgagctgctgatggaggtgcacggcaacggcaagagacccagccccgagagaagagaggagaacagcttcgacagagacaccatcgcccccgagccccccgccaagagagtgtgcaccatcagccccgcccccagacacagccccgccctgaccgtgcccctgatgaaccccggcggccagttccaccccacccccccccccctgcagcactacaccctggaggacatcgccaccagccacctgtacagagagcccaacaagatgctggagcacagagaggtgagagacagacaccacagcctgggcctgaacggcggctaccaggacgagctggtggaccacagactgaccgagagagagtgggccgacgagtggaagcacctggaccacgccctgaactgcatcatggagatggtggagaagaccagaagaagcatggccgtgctgagaagatgccaggagagcgacagagaggagctgaactactggaagagaagatacaacgagaacaccgagctgagaaagaccggcaccgagctggtgagcagacagcacagccccggcagcgccgacagcctgagcaacgacagccagagagagttcaacagcagacccggcaccggctacgtgcccgtggagttctggaagaagaccgaggaggccgtgaacaaggtgaagatccaggccatgagcgaggtgcagaaggccgtggccgaggccgagcagaaggccttcgaggtgatcgccaccgagagagccagaatggagcagaccatcgccgacgtgaagagacaggccgccgaggacgccttcctggtgatcaacgagcaggaggagagcaccgagaactgctggaactgcggcagaaaggccagcgagacctgcagcggctgcaacatcgccagatactgcggcagcttctgccagcacaaggactgggagagacaccacagactgtgcggccagaacctgcacggccagagcccccacggccagggcagacccctgctgcccgtgggcagaggcagcagcgccagaagcgccgactgcagcgtgcccagccccgccctggacaagaccagcgccaccaccagcagaagcagcacccccgccagcgtgaccgccatcgacaccaacggcctgtga

SEQ ID NO: 660 - RNA, 1845 nt, synthetic construct
  misc_feature 1..1845: note = Homo sapiens__O43439-4__RUNX1T1b CDS opt4
  source 1..1845: mol_type = other RNA
atgggcttccaccacgtgggccaggccagactggagctgctgaccagcggcgacctgcccgccctggccagccagagagccggcatcaccgtgggccccgagaagagagtgcccgccatgcccggcagccccgtggaggtgaagatccagagcagaagcagcccccccaccatgccccccctgccccccatcaaccccggcggccccagacccgtgagcttcacccccaccgccctgagcaacggcatcaaccacagcccccccaccctgaacggcgcccccagccccccccagagattcagcaacggccccgccagcagcaccagcagcgccctgaccaaccagcagctgcccgccacctgcggcgccagacagctgagcaagctgaagagattcctgaccaccctgcagcagttcggcaacgacatcagccccgagatcggcgagaaggtgagaaccctggtgctggccctggtgaacagcaccgtgaccatcgaggagttccactgcaagctgcaggaggccaccaacttccccctgagacccttcgtgatccccttcctgaaggccaacctgcccctgctgcagagagagctgctgcactgcgccagagccgccaagcagacccccagccagtacctggcccagcacgagcacctgctgctgaacaccagcatcgccagccccgccgacagcagcgagctgctgatggaggtgcacggcaacggcaagagacccagccccgagagaagagaggagaacagcttcgacagagacaccatcgcccccgagccccccgccaagagagtgtgcaccatcagccccgcccccagacacagccccgccctgaccgtgcccctgatgaaccccggcggccagttccaccccacccccccccccctgcagcactacaccctggaggacatcgccaccagccacctgtacagagagcccaacaagatgctggagcacagagaggtgagagacagacaccacagcctgggcctgaacggcggctaccaggacgagctggtggaccacagactgaccgagagagagtgggccgacgagtggaagcacctggaccacgccctgaactgcatcatggagatggtggagaagaccagaagaagcatggccgtgctgagaagatgccaggagagcgacagagaggagctgaactactggaagagaagatacaacgagaacaccgagctgagaaagaccggcaccgagctggtgagcagacagcacagccccggcagcgccgacagcctgagcaacgacagccagagagagttcaacagcagacccggcaccggctacgtgcccgtggagttctggaagaagaccgaggaggccgtgaacaaggtgaagatccaggccatgagcgaggtgcagaaggccgtggccgaggccgagcagaaggccttcgaggtgatcgccaccgagagagccagaatggagcagaccatcgccgacgtgaagagacaggccgccgaggacgccttcctggtgatcaacgagcaggaggagagcaccgagaactgctggaactgcggcagaaaggccagcgagacctgcagcggctgcaacatcgccagatactgcggcagcttctgccagcacaaggactgggagagacaccacagactgtgcggccagaacctgcacggccagagcccccacggccagggcagacccctgctgcccgtgggcagaggcagcagcgccagaagcgccgactgcagcgtgcccagccccgccctggacaagaccagcgccaccaccagcagaagcagcacccccgccagcgtgaccgccatcgacaccaacggcctgtga

SEQ ID NO: 661 - RNA, 1788 nt, synthetic construct
  misc_feature 1..1788: note = Homo sapiens__O43439-5__RUNX1T1b CDS opt4
  source 1..1788: mol_type = other RNA
atggtgggcgtgcccggcgccgccgccttccagctgggccccgagaagagagtgcccgccatgcccggcagccccgtggaggtgaagatccagagcagaagcagcccccccaccatgccccccctgccccccatcaaccccggcggccccagacccgtgagcttcacccccaccgccctgagcaacggcatcaaccacagcccccccaccctgaacggcgcccccagccccccccagagattcagcaacggccccgccagcagcaccagcagcgccctgaccaaccagcagctgcccgccacctgcggcgccagacagctgagcaagctgaagagattcctgaccaccctgcagcagttcggcaacgacatcagccccgagatcggcgagaaggtgagaaccctggtgctggccctggtgaacagcaccgtgaccatcgaggagttccactgcaagctgcaggaggccaccaacttccccctgagacccttcgtgatccccttcctgaaggccaacctgcccctgctgcagagagagctgctgcactgcgccagagccgccaagcagacccccagccagtacctggcccagcacgagcacctgctgctgaacaccagcatcgccagccccgccgacagcagcgagctgctgatggaggtgcacggcaacggcaagagacccagccccgagagaagagaggagaacagcttcgacagagacaccatcgcccccgagccccccgccaagagagtgtgcaccatcagccccgcccccagacacagccccgccctgaccgtgcccctgatgaaccccggcggccagttccaccccacccccccccccctgcagcactacaccctggaggacatcgccaccagccacctgtacagagagcccaacaagatgctggagcacagagaggtgagagacagacaccacagcctgggcctgaacggcggctaccaggacgagctggtggaccacagactgaccgagagagagtgggccgacgagtggaagcacctggaccacgccctgaactgcatcatggagatggtggagaagaccagaagaagcatggccgtgctgagaagatgccaggagagcgacagagaggagctgaactactggaagagaagatacaacgagaacaccgagctgagaaagaccggcaccgagctggtgagcagacagcacagccccggcagcgccgacagcctgagcaacgacagccagagagagttcaacagcagacccggcaccggctacgtgcccgtggagttctggaagaagaccgaggaggccgtgaacaaggtgaagatccaggccatgagcgaggtgcagaaggccgtggccgaggccgagcagaaggccttcgaggtgatcgccaccgagagagccagaatggagcagaccatcgccgacgtgaagagacaggccgccgaggacgccttcctggtgatcaacgagcaggaggagagcaccgagaactgctggaactgcggcagaaaggccagcgagacctgcagcggctgcaacatcgccagatactgcggcagcttctgccagcacaaggactgggagagacaccacagactgtgcggccagaacctgcacggccagagcccccacggccagggcagacccctgctgcccgtgggcagaggcagcagcgccagaagcgccgactgcagcgtgcccagccccgccctggacaagaccagcgccaccaccagcagaagcagcacccccgccagcgtgaccgccatcgacaccaacggcctgtga

SEQ ID NO: 662 - RNA, 1728 nt, synthetic construct
  misc_feature 1..1728: note = Homo sapiens__O43439-2__RUNX1T1b CDS opt4
  source 1..1728: mol_type = other RNA
atgcccggcagccccgtggaggtgaagatccagagcagaagcagcccccccaccatgccccccctgccccccatcaaccccggcggccccagacccgtgagcttcacccccaccgccctgagcaacggcatcaaccacagcccccccaccctgaacggcgcccccagccccccccagagattcagcaacggccccgccagcagcaccagcagcgccctgaccaaccagcagctgcccgccacctgcggcgccagacagctgagcaagctgaagagattcctgaccaccctgcagcagttcggcaacgacatcagccccgagatcggcgagaaggtgagaaccctggtgctggccctggtgaacagcaccgtgaccatcgaggagttccactgcaagctgcaggaggccaccaacttccccctgagacccttcgtgatccccttcctgaaggccaacctgcccctgctgcagagagagctgctgcactgcgccagagccgccaagcagacccccagccagtacctggcccagcacgagcacctgctgctgaacaccagcatcgccagccccgccgacagcagcgagctgctgatggaggtgcacggcaacggcaagagacccagccccgagagaagagaggagaacagcttcgacagagacaccatcgcccccgagccccccgccaagagagtgtgcaccatcagccccgcccccagacacagccccgccctgaccgtgcccctgatgaaccccggcggccagttccaccccacccccccccccctgcagcactacaccctggaggacatcgccaccagccacctgtacagagagcccaacaagatgctggagcacagagaggtgagagacagacaccacagcctgggcctgaacggcggctaccaggacgagctggtggaccacagactgaccgagagagagtgggccgacgagtggaagcacctggaccacgccctgaactgcatcatggagatggtggagaagaccagaagaagcatggccgtgctgagaagatgccaggagagcgacagagaggagctgaactactggaagagaagatacaacgagaacaccgagctgagaaagaccggcaccgagctggtgagcagacagcacagccccggcagcgccgacagcctgagcaacgacagccagagagagttcaacagcagacccggcaccggctacgtgcccgtggagttctggaagaagaccgaggaggccgtgaacaaggtgaagatccaggccatgagcgaggtgcagaaggccgtggccgaggccgagcagaaggccttcgaggtgatcgccaccgagagagccagaatggagcagaccatcgccgacgtgaagagacaggccgccgaggacgccttcctggtgatcaacgagcaggaggagagcaccgagaactgctggaactgcggcagaaaggccagcgagacctgcagcggctgcaacatcgccagatactgcggcagcttctgccagcacaaggactgggagagacaccacagactgtgcggccagaacctgcacggccagagcccccacggccagggcagacccctgctgcccgtgggcagaggcagcagcgccagaagcgccgactgcagcgtgcccagccccgccctggacaagaccagcgccaccaccagcagaagcagcacccccgccagcgtgaccgccatcgacaccaacggcctgtga

SEQ ID NO: 663 - RNA, 48 nt, synthetic construct
  misc_feature 1..48: note = Homo sapiens____RUNX1T1b(short) CDS opt4
  source 1..48: mol_type = other RNA
gaggtgggcttctgccacgtggcccaggtgggcctgaagctgctgggc

SEQ ID NO: 664 - RNA, 1749 nt, synthetic construct
  misc_feature 1..1749: note = Homo sapiens__O43439-1__RUNX1T1b(22-604) CDS opt4
  source 1..1749: mol_type = other RNA
ggccccgagaagagagtgcccgccatgcccggcagccccgtggaggtgaagatccagagcagaagcagcccccccaccatgccccccctgccccccatcaaccccggcggccccagacccgtgagcttcacccccaccgccctgagcaacggcatcaaccacagcccccccaccctgaacggcgcccccagccccccccagagattcagcaacggccccgccagcagcaccagcagcgccctgaccaaccagcagctgcccgccacctgcggcgccagacagctgagcaagctgaagagattcctgaccaccctgcagcagttcggcaacgacatcagccccgagatcggcgagaaggtgagaaccctggtgctggccctggtgaacagcaccgtgaccatcgaggagttccactgcaagctgcaggaggccaccaacttccccctgagacccttcgtgatccccttcctgaaggccaacctgcccctgctgcagagagagctgctgcactgcgccagagccgccaagcagacccccagccagtacctggcccagcacgagcacctgctgctgaacaccagcatcgccagccccgccgacagcagcgagctgctgatggaggtgcacggcaacggcaagagacccagccccgagagaagagaggagaacagcttcgacagagacaccatcgcccccgagccccccgccaagagagtgtgcaccatcagccccgcccccagacacagccccgccctgaccgtgcccctgatgaaccccggcggccagttccaccccacccccccccccctgcagcactacaccctggaggacatcgccaccagccacctgtacagagagcccaacaagatgctggagcacagagaggtgagagacagacaccacagcctgggcctgaacggcggctaccaggacgagctggtggaccacagactgaccgagagagagtgggccgacgagtggaagcacctggaccacgccctgaactgcatcatggagatggtggagaagaccagaagaagcatggccgtgctgagaagatgccaggagagcgacagagaggagctgaactactggaagagaagatacaacgagaacaccgagctgagaaagaccggcaccgagctggtgagcagacagcacagccccggcagcgccgacagcctgagcaacgacagccagagagagttcaacagcagacccggcaccggctacgtgcccgtggagttctggaagaagaccgaggaggccgtgaacaaggtgaagatccaggccatgagcgaggtgcagaaggccgtggccgaggccgagcagaaggccttcgaggtgatcgccaccgagagagccagaatggagcagaccatcgccgacgtgaagagacaggccgccgaggacgccttcctggtgatcaacgagcaggaggagagcaccgagaactgctggaactgcggcagaaaggccagcgagacctgcagcggctgcaacatcgccagatactgcggcagcttctgccagcacaaggactgggagagacaccacagactgtgcggccagaacctgcacggccagagcccccacggccagggcagacccctgctgcccgtgggcagaggcagcagcgccagaagcgccgactgcagcgtgcccagccccgccctggacaagaccagcgccaccaccagcagaagcagcacccccgccagcgtgaccgccatcgacaccaacggcctg

SEQ ID NO: 665 - RNA, 1836 nt, synthetic construct
  misc_feature 1..1836: note = Homo sapiens____CBFbeta(1-165)_SMMHC(1527-1972) CDS opt4
  source 1..1836: mol_type = other RNA
atgcccagagtggtgcccgaccagagaagcaagttcgagaacgaggagttcttcagaaagctgagcagagagtgcgagatcaagtacaccggcttcagagacagaccccacgaggagagacaggccagattccagaacgcctgcagagacggcagaagcgagatcgccttcgtggccaccggcaccaacctgagcctgcagttcttccccgccagctggcagggcgagcagagacagacccccagcagagagtacgtggacctggagagagaggccggcaaggtgtacctgaaggcccccatgatcctgaacggcgtgtgcgtgatctggaagggctggatcgacctgcagagactggacggcatgggctgcctggagttcgacgaggagagagcccagcaggaggacgccctggcccagcaggccttcgaggaggccagaagaagaaccagagagttcgaggacagagacagaagccacagagaggagatggaggtgcacgagctggagaagagcaagagagccctggagacccagatggaggagatgaagacccagctggaggagctggaggacgagctgcaggccaccgaggacgccaagctgagactggaggtgaacatgcaggccctgaagggccagttcgagagagacctgcaggccagagacgagcagaacgaggagaagagaagacagctgcagagacagctgcacgagtacgagaccgagctggaggacgagagaaagcagagagccctggccgccgccgccaagaagaagctggagggcgacctgaaggacctggagctgcaggccgacagcgccatcaagggcagagaggaggccatcaagcagctgagaaagctgcaggcccagatgaaggacttccagagagagctggaggacgccagagccagcagagacgagatcttcgccaccgccaaggagaacgagaagaaggccaagagcctggaggccgacctgatgcagctgcaggaggacctggccgccgccgagagagccagaaagcaggccgacctggagaaggaggagctggccgaggagctggccagcagcctgagcggcagaaacgccctgcaggacgagaagagaagactggaggccagaatcgcccagctggaggaggagctggaggaggagcagggcaacatggaggccatgagcgacagagtgagaaaggccacccagcaggccgagcagctgagcaacgagctggccaccgagagaagcaccgcccagaagaacgagagcgccagacagcagctggagagacagaacaaggagctgagaagcaagctgcacgagatggagggcgccgtgaagagcaagttcaagagcaccatcgccgccctggaggccaagatcgcccagctggaggagcaggtggagcaggaggccagagagaagcaggccgccaccaagagcctgaagcagaaggacaagaagctgaaggagatcctgctgcaggtggaggacgagagaaagatggccgagcagtacaaggagcaggccgagaagggcaacgccagagtgaagcagctgaagagacagctggaggaggccgaggaggagagccagagaatcaacgccaacagaagaaagctgcagagagagctggacgaggccaccgagagcaacgaggccatgggcagagaggtgaacgccctgaagagcaagctgagaagaggcaacgagaccagcttcgtgcccagcagaagaagcggcggcagaagagtgatcgagaacgccgacggcagcgaggaggagaccgacaccagagacgccgacttcaacggcaccaaggccagcgagtga

SEQ ID NO: 666 - RNA, 1551 nt, synthetic construct
  misc_feature 1..1551: note = Artificial____CBFbeta(1-165)_SMMHC(1527-1877) CDS opt4
  source 1..1551: mol_type = other RNA
atgcccagagtggtgcccgaccagagaagcaagttcgagaacgaggagttcttcagaaagctgagcagagagtgcgagatcaagtacaccggcttcagagacagaccccacgaggagagacaggccagattccagaacgcctgcagagacggcagaagcgagatcgccttcgtggccaccggcaccaacctgagcctgcagttcttccccgccagctggcagggcgagcagagacagacccccagcagagagtacgtggacctggagagagaggccggcaaggtgtacctgaaggcccccatgatcctgaacggcgtgtgcgtgatctggaagggctggatcgacctgcagagactggacggcatgggctgcctggagttcgacgaggagagagcccagcaggaggacgccctggcccagcaggccttcgaggaggccagaagaagaaccagagagttcgaggacagagacagaagccacagagaggagatggaggtgcacgagctggagaagagcaagagagccctggagacccagatggaggagatgaagacccagctggaggagctggaggacgagctgcaggccaccgaggacgccaagctgagactggaggtgaacatgcaggccctgaagggccagttcgagagagacctgcaggccagagacgagcagaacgaggagaagagaagacagctgcagagacagctgcacgagtacgagaccgagctggaggacgagagaaagcagagagccctggccgccgccgccaagaagaagctggagggcgacctgaaggacctggagctgcaggccgacagcgccatcaagggcagagaggaggccatcaagcagctgagaaagctgcaggcccagatgaaggacttccagagagagctggaggacgccagagccagcagagacgagatcttcgccaccgccaaggagaacgagaagaaggccaagagcctggaggccgacctgatgcagctgcaggaggacctggccgccgccgagagagccagaaagcaggccgacctggagaaggaggagctggccgaggagctggccagcagcctgagcggcagaaacgccctgcaggacgagaagagaagactggaggccagaatcgcccagctggaggaggagctggaggaggagcagggcaacatggaggccatgagcgacagagtgagaaaggccacccagcaggccgagcagctgagcaacgagctggccaccgagagaagcaccgcccagaagaacgagagcgccagacagcagctggagagacagaacaaggagctgagaagcaagctgcacgagatggagggcgccgtgaagagcaagttcaagagcaccatcgccgccctggaggccaagatcgcccagctggaggagcaggtggagcaggaggccagagagaagcaggccgccaccaagagcctgaagcagaaggacaagaagctgaaggagatcctgctgcaggtggaggacgagagaaagatggccgagcagtacaaggagcaggccgagaagggcaacgcctga

SEQ ID NO: 667 - RNA, 612 nt, synthetic construct
  misc_feature 1..612: note = Artificial____CBFbeta(1-165)_Linker_Lifeact CDS opt4
  source 1..612: mol_type = other RNA
atgcccagagtggtgcccgaccagagaagcaagttcgagaacgaggagttcttcagaaagctgagcagagagtgcgagatcaagtacaccggcttcagagacagaccccacgaggagagacaggccagattccagaacgcctgcagagacggcagaagcgagatcgccttcgtggccaccggcaccaacctgagcctgcagttcttccccgccagctggcagggcgagcagagacagacccccagcagagagtacgtggacctggagagagaggccggcaaggtgtacctgaaggcccccatgatcctgaacggcgtgtgcgtgatctggaagggctggatcgacctgcagagactggacggcatgggctgcctggagttcgacgaggagagagcccagcaggaggacgccctggcccagcaggccttcgaggaggccagaagaagaaccagagagttcgaggacagagacagaagccacagagaggagatggagggcggcagcggcggcagcggcggcagcggcggcagcggcggcggcggcgtggccgacctgatcaagaagttcgagagcatcagcaaggaggagggcgacccccccgtggccacctga

SEQ ID NO: 668 - RNA, 579 nt, synthetic construct
  misc_feature 1..579: note = Artificial____CBFbeta(1-165)_HIF1alpha(549-575) CDS opt4
  source 1..579: mol_type = other RNA
atgcccagagtggtgcccgaccagagaagcaagttcgagaacgaggagttcttcagaaagctgagcagagagtgcgagatcaagtacaccggcttcagagacagaccccacgaggagagacaggccagattccagaacgcctgcagagacggcagaagcgagatcgccttcgtggccaccggcaccaacctgagcctgcagttcttccccgccagctggcagggcgagcagagacagacccccagcagagagtacgtggacctggagagagaggccggcaaggtgtacctgaaggcccccatgatcctgaacggcgtgtgcgtgatctggaagggctggatcgacctgcagagactggacggcatgggctgcctggagttcgacgaggagagagcccagcaggaggacgccctggcccagcaggccttcgaggaggccagaagaagaaccagagagttcgaggacagagacagaagccacagagaggagatggagcccttcagcacccaggacaccgacctggacctggagatgctggccccctacatccccatggacgacgacttccagctgagatga

SEQ ID NO: 669 - RNA, 624 nt, synthetic construct
  misc_feature 1..624: note Artificial____CBFbeta(1-165)_Linker_HIF1alpha(549-575) CDS opt4
  source 1..624: mol_type = other RNA
atgcccagagtggtgcccgaccagagaagcaagttcgagaacgaggagttcttcagaaagctgagcagagagtgcgagatcaagtacaccggcttcagagacagaccccacgaggagagacaggccagattccagaacgcctgcagagacggcagaagcgagatcgccttcgtggccaccggcaccaacctgagcctgcagttcttccccgccagctggcagggcgagcagagacagacccccagcagagagtacgtggacctggagagagaggccggcaaggtgtacctgaaggcccccatgatcctgaacggcgtgtgcgtgatctggaagggctggatcgacctgcagagactggacggcatgggctgcctggagttcgacgaggagagagcccagcaggaggacgccctggcccagcaggccttcgaggaggccagaagaagaaccagagagttcgaggacagagacagaagccacagagaggagatggagggcggcagcggcggcagcggcggcagcggcggcagcggcggcggccccttcagcacccaggacaccgacctggacctggagatgctggccccctacatccccatggacgacgacttccagctgagatga

SEQ ID NO: 670 - RNA, 2259 nt, synthetic construct
  misc_feature 1..2259: note = Artificial____RUNX1(1-177)_N_RUNX1T1a(31-604) CDS opt4
  source 1..2259: mol_type = other RNA
atgagaatccccgtggacgccagcaccagcagaagattcaccccccccagcaccgccctgagccccggcaagatgagcgaggccctgcccctgggcgcccccgacgccggcgccgccctggccggcaagctgagaagcggcgacagaagcatggtggaggtgctggccgaccaccccggcgagctggtgagaaccgacagccccaacttcctgtgcagcgtgctgcccacccactggagatgcaacaagaccctgcccatcgccttcaaggtggtggccctgggcgacgtgcccgacggcaccctggtgaccgtgatggccggcaacgacgagaactacagcgccgagctgagaaacgccaccgccgccatgaagaaccaggtggccagattcaacgacctgagattcgtgggcagaagcggcagaggcaagagcttcaccctgaccatcaccgtgttcaccaaccccccccaggtggccacctaccacagagccatcaagatcaccgtggacggccccagagagcccagaaacagaaccgagaagcacagcaccatgcccgacagccccgtggacgtgaagacccagagcagactgaccccccccaccatgccccccccccccaccacccagggcgcccccagaaccagcagcttcacccccaccaccctgaccaacggcaccagccacagccccaccgccctgaacggcgcccccagcccccccaacggcttcagcaacggccccagcagcagcagcagcagcagcctggccaaccagcagctgccccccgcctgcggcgccagacagctgagcaagctgaagagattcctgaccaccctgcagcagttcggcaacgacatcagccccgagatcggcgagagagtgagaaccctggtgctgggcctggtgaacagcaccctgaccatcgaggagttccacagcaagctgcaggaggccaccaacttccccctgagacccttcgtgatccccttcctgaaggccaacctgcccctgctgcagagagagctgctgcactgcgccagactggccaagcagaaccccgcccagtacctggcccagcacgagcagctgctgctggacgccagcaccaccagccccgtggacagcagcgagctgctgctggacgtgaacgagaacggcaagagaagaacccccgacagaaccaaggagaacggcttcgacagagagcccctgcacagcgagcaccccagcaagagaccctgcaccatcagccccggccagagatacagccccaacaacggcctgagctaccagcccaacggcctgccccaccccacccccccccccccccagcactacagactggacgacatggccatcgcccaccactacagagacagctacagacaccccagccacagagacctgagagacagaaacagacccatgggcctgcacggcaccagacaggaggagatgatcgaccacagactgaccgacagagagtgggccgaggagtggaagcacctggaccacctgctgaactgcatcatggacatggtggagaagaccagaagaagcctgaccgtgctgagaagatgccaggaggccgacagagaggagctgaactactggatcagaagatacagcgacgccgaggacctgaagaagggcggcggcagcagcagcagccacagcagacagcagagccccgtgaaccccgaccccgtggccctggacgcccacagagagttcctgcacagacccgccagcggctacgtgcccgaggagatctggaagaaggccgaggaggccgtgaacgaggtgaagagacaggccatgaccgagctgcagaaggccgtgagcgaggccgagagaaaggcccacgacatgatcaccaccgagagagccaagatggagagaaccgtggccgaggccaagagacaggccgccgaggacgccctggccgtgatcaaccagcaggaggacagcagcgagagctgctggaactgcggcagaaaggccagcgagacctgcagcggctgcaacaccgccagatactgcggcagcttctgccagcacaaggactgggagaagcaccaccacatctgcggccagaccctgcaggcccagcagcagggcgacacccccgccgtgagcagcagcgtgacccccaacagcggcgccggcagccccatggacaccccccccgccgccacccccagaagcaccacccccggcacccccagcaccatcgagaccacccccagatga

SEQ ID NO: 671 - RNA, 774 nt, synthetic construct
  misc_feature 1..774: note = Artificial____RUNX1(1-241)_RUNX1T1b(short) CDS opt4
  source 1..774: mol_type = other RNA
atgagaatccccgtggacgccagcaccagcagaagattcaccccccccagcaccgccctgagccccggcaagatgagcgaggccctgcccctgggcgcccccgacgccggcgccgccctggccggcaagctgagaagcggcgacagaagcatggtggaggtgctggccgaccaccccggcgagctggtgagaaccgacagccccaacttcctgtgcagcgtgctgcccacccactggagatgcaacaagaccctgcccatcgccttcaaggtggtggccctgggcgacgtgcccgacggcaccctggtgaccgtgatggccggcaacgacgagaactacagcgccgagctgagaaacgccaccgccgccatgaagaaccaggtggccagattcaacgacctgagattcgtgggcagaagcggcagaggcaagagcttcaccctgaccatcaccgtgttcaccaaccccccccaggtggccacctaccacagagccatcaagatcaccgtggacggccccagagagcccagaagacacagacagaagctggacgaccagaccaagcccggcagcctgagcttcagcgagagactgagcgagctggagcagctgagaagaaccgccatgagagtgagcccccaccaccccgcccccacccccaaccccagagccagcctgaaccacagcaccgccttcaacccccagccccagagccagatgcaggaggtgggcttctgccacgtggcccaggtgggcctgaagctgctgggctga

SEQ ID NO: 672 - RNA, 2478 nt, synthetic construct
  misc_feature 1..2478: note = Artificial____RUNX1(1-241)_V_RUNX1T1b(22-604) CDS opt4
  source 1..2478: mol_type = other RNA
atgagaatccccgtggacgccagcaccagcagaagattcaccccccccagcaccgccctgagccccggcaagatgagcgaggccctgcccctgggcgcccccgacgccggcgccgccctggccggcaagctgagaagcggcgacagaagcatggtggaggtgctggccgaccaccccggcgagctggtgagaaccgacagccccaacttcctgtgcagcgtgctgcccacccactggagatgcaacaagaccctgcccatcgccttcaaggtggtggccctgggcgacgtgcccgacggcaccctggtgaccgtgatggccggcaacgacgagaactacagcgccgagctgagaaacgccaccgccgccatgaagaaccaggtggccagattcaacgacctgagattcgtgggcagaagcggcagaggcaagagcttcaccctgaccatcaccgtgttcaccaaccccccccaggtggccacctaccacagagccatcaagatcaccgtggacggccccagagagcccagaagacacagacagaagctggacgaccagaccaagcccggcagcctgagcttcagcgagagactgagcgagctggagcagctgagaagaaccgccatgagagtgagcccccaccaccccgcccccacccccaaccccagagccagcctgaaccacagcaccgccttcaacccccagccccagagccagatgcaggtgggccccgagaagagagtgcccgccatgcccggcagccccgtggaggtgaagatccagagcagaagcagcccccccaccatgccccccctgccccccatcaaccccggcggccccagacccgtgagcttcacccccaccgccctgagcaacggcatcaaccacagcccccccaccctgaacggcgcccccagccccccccagagattcagcaacggccccgccagcagcaccagcagcgccctgaccaaccagcagctgcccgccacctgcggcgccagacagctgagcaagctgaagagattcctgaccaccctgcagcagttcggcaacgacatcagccccgagatcggcgagaaggtgagaaccctggtgctggccctggtgaacagcaccgtgaccatcgaggagttccactgcaagctgcaggaggccaccaacttccccctgagacccttcgtgatccccttcctgaaggccaacctgcccctgctgcagagagagctgctgcactgcgccagagccgccaagcagacccccagccagtacctggcccagcacgagcacctgctgctgaacaccagcatcgccagccccgccgacagcagcgagctgctgatggaggtgcacggcaacggcaagagacccagccccgagagaagagaggagaacagcttcgacagagacaccatcgcccccgagccccccgccaagagagtgtgcaccatcagccccgcccccagacacagccccgccctgaccgtgcccctgatgaaccccggcggccagttccaccccacccccccccccctgcagcactacaccctggaggacatcgccaccagccacctgtacagagagcccaacaagatgctggagcacagagaggtgagagacagacaccacagcctgggcctgaacggcggctaccaggacgagctggtggaccacagactgaccgagagagagtgggccgacgagtggaagcacctggaccacgccctgaactgcatcatggagatggtggagaagaccagaagaagcatggccgtgctgagaagatgccaggagagcgacagagaggagctgaactactggaagagaagatacaacgagaacaccgagctgagaaagaccggcaccgagctggtgagcagacagcacagccccggcagcgccgacagcctgagcaacgacagccagagagagttcaacagcagacccggcaccggctacgtgcccgtggagttctggaagaagaccgaggaggccgtgaacaaggtgaagatccaggccatgagcgaggtgcagaaggccgtggccgaggccgagcagaaggccttcgaggtgatcgccaccgagagagccagaatggagcagaccatcgccgacgtgaagagacaggccgccgaggacgccttcctggtgatcaacgagcaggaggagagcaccgagaactgctggaactgcggcagaaaggccagcgagacctgcagcggctgcaacatcgccagatactgcggcagcttctgccagcacaaggactgggagagacaccacagactgtgcggccagaacctgcacggccagagcccccacggccagggcagacccctgctgcccgtgggcagaggcagcagcgccagaagcgccgactgcagcgtgcccagccccgccctggacaagaccagcgccaccaccagcagaagcagcacccccgccagcgtgaccgccatcgacaccaacggcctgtga

SEQ ID NO: 673 - RNA, 2478 nt, synthetic construct
  misc_feature 1..2478: note = Artificial____RUNX1(1-241)_I_RUNX1T1b(22-604) CDS opt4
  source 1..2478: mol_type = other RNA
atgagaatccccgtggacgccagcaccagcagaagattcaccccccccagcaccgccctgagccccggcaagatgagcgaggccctgcccctgggcgcccccgacgccggcgccgccctggccggcaagctgagaagcggcgacagaagcatggtggaggtgctggccgaccaccccggcgagctggtgagaaccgacagccccaacttcctgtgcagcgtgctgcccacccactggagatgcaacaagaccctgcccatcgccttcaaggtggtggccctgggcgacgtgcccgacggcaccctggtgaccgtgatggccggcaacgacgagaactacagcgccgagctgagaaacgccaccgccgccatgaagaaccaggtggccagattcaacgacctgagattcgtgggcagaagcggcagaggcaagagcttcaccctgaccatcaccgtgttcaccaaccccccccaggtggccacctaccacagagccatcaagatcaccgtggacggccccagagagcccagaagacacagacagaagctggacgaccagaccaagcccggcagcctgagcttcagcgagagactgagcgagctggagcagctgagaagaaccgccatgagagtgagcccccaccaccccgcccccacccccaaccccagagccagcctgaaccacagcaccgccttcaacccccagccccagagccagatgcagatcggccccgagaagagagtgcccgccatgcccggcagccccgtggaggtgaagatccagagcagaagcagcccccccaccatgccccccctgccccccatcaaccccggcggccccagacccgtgagcttcacccccaccgccctgagcaacggcatcaaccacagcccccccaccctgaacggcgcccccagccccccccagagattcagcaacggccccgccagcagcaccagcagcgccctgaccaaccagcagctgcccgccacctgcggcgccagacagctgagcaagctgaagagattcctgaccaccctgcagcagttcggcaacgacatcagccccgagatcggcgagaaggtgagaaccctggtgctggccctggtgaacagcaccgtgaccatcgaggagttccactgcaagctgcaggaggccaccaacttccccctgagacccttcgtgatccccttcctgaaggccaacctgcccctgctgcagagagagctgctgcactgcgccagagccgccaagcagacccccagccagtacctggcccagcacgagcacctgctgctgaacaccagcatcgccagccccgccgacagcagcgagctgctgatggaggtgcacggcaacggcaagagacccagccccgagagaagagaggagaacagcttcgacagagacaccatcgcccccgagccccccgccaagagagtgtgcaccatcagccccgcccccagacacagccccgccctgaccgtgcccctgatgaaccccggcggccagttccaccccacccccccccccctgcagcactacaccctggaggacatcgccaccagccacctgtacagagagcccaacaagatgctggagcacagagaggtgagagacagacaccacagcctgggcctgaacggcggctaccaggacgagctggtggaccacagactgaccgagagagagtgggccgacgagtggaagcacctggaccacgccctgaactgcatcatggagatggtggagaagaccagaagaagcatggccgtgctgagaagatgccaggagagcgacagagaggagctgaactactggaagagaagatacaacgagaacaccgagctgagaaagaccggcaccgagctggtgagcagacagcacagccccggcagcgccgacagcctgagcaacgacagccagagagagttcaacagcagacccggcaccggctacgtgcccgtggagttctggaagaagaccgaggaggccgtgaacaaggtgaagatccaggccatgagcgaggtgcagaaggccgtggccgaggccgagcagaaggccttcgaggtgatcgccaccgagagagccagaatggagcagaccatcgccgacgtgaagagacaggccgccgaggacgccttcctggtgatcaacgagcaggaggagagcaccgagaactgctggaactgcggcagaaaggccagcgagacctgcagcggctgcaacatcgccagatactgcggcagcttctgccagcacaaggactgggagagacaccacagactgtgcggccagaacctgcacggccagagcccccacggccagggcagacccctgctgcccgtgggcagaggcagcagcgccagaagcgccgactgcagcgtgcccagccccgccctggacaagaccagcgccaccaccagcagaagcagcacccccgccagcgtgaccgccatcgacaccaacggcctgtga

SEQ ID NO: 674 - RNA, 549 nt, synthetic construct
  misc_feature 1..549: note = Homo sapiens__Q13951-1__CBFbeta CDS opt5
  source 1..549: mol_type = other RNA
atgcccagagtggtccctgaccagcggagcaagttcgagaacgaagagtttttccgcaaactgtccagagaatgcgagatcaagtacaccggctttcgggatcgcccgcacgaagagagacaagcccggttccagaatgcttgtcgcgacgggagatctgagattgcctttgttgcgacaggaacgaacctcagcctgcagttctttcccgcttcctggcagggcgaacaacggcagaccccttctcgcgagtatgtggatcttgaaagagaggccgggaaagtgtacctgaaggcccccatgatcctcaatggagtctgcgtgatttggaaaggctggatcgacctgcagcggcttgatgggatgggatgtctggagttcgacgaggaacgcgctcagcaagaagatgccctcgctcagcaggcctttgaggaagcgagacggcgcacaagagagttcgaggaccgggatagaagccatcgcgaagagatggaagttcgggtgtcccagctgctggccgtcaccggcaagaagacaaccagaccttga

SEQ ID NO: 675 - RNA, 672 nt, synthetic construct
  misc_feature 1..672: note = Homo sapiens__A0A494C0A9__CBFbeta CDS opt5
  source 1..672: mol_type = other RNA
atgcccagagtggtccctgaccagcggagcaagttcgagaacgaagagtttttccgcaaactgtccagagaatgcgagatcaagtacaccggctttcgggatcgcccgcacgaagagagacaagcccggttccagaatgcttgtcgcgacgggagatctgagattgcctttgttgcgacaggaacgaacctcagcctgcagttctttcccgcttcctggcagggcgaacaacggcagaccccttctcgcgagtatgtggatcttgaaagagaggccgggaaagtgtacctgaaggcccccatgatcctcaatggagtctgcgtgatttggaaaggctggatcgacctgcagcggcttgatgggatgggatgtctggagttcgacgaggaacgcgctcagcaagaagatgccctcgctcagcaggcctttgaggaagcgagacggcgcacaagagagttcgaggaccgggatagaagccatcgcgaagagatggaagttcgggtgtcccagctgctggccgtcaccgagtggagatctacacgcaagtttagctccttctggattcctccccctcggggctgcttttgtatcgctctcaccagcagagaaaactcttcctgctggtgtgtgttcttccgcctgatctggagccaccttatgacagcctcttga

SEQ ID NO: 676 - RNA, 609 nt, synthetic construct
  misc_feature 1..609: note = Homo sapiens__J3KRT0__CBFbeta CDS opt5
  source 1..609: mol_type = other RNA
atgcccagagtggtccctgaccagcggagcaagttcgagaacgaagagtttttccgcaaactgtccagagaatgcgagatcaagtacaccggctttcgggatcgcccgcacgaagagagacaagcccggttccagaatgcttgtcgcgacgggagatctgagattgttagccggctcgcccgcggagcgagaggctccctggtggctcgggggcgcggaggccccgggagatttcggacagccgcccgccttctgagactccctgaactgtctggacggagacttacgagctattccggcttcaaaatgcgcaaccagatgccccgggctggcaccagaggggagacactgtttctcggactggccgctgtggcccgcgtcggccagcggtctaccgcgagcggggccagaacacgcgctcggctgaataagagacgcgccctcttccggagacgccatcggagacgggtgcaaggaatctgctccaaacagacccctattcgcaagaagaaatggagctttatccagggcttctgtgggcacagaaaccagtctgtttcccccgtgtttagcggacaactggctggccggacagccaccaatacgtga

SEQ ID NO: 677 - RNA, 564 nt, synthetic construct
  misc_feature 1..564: note = Homo sapiens__Q13951-2__CBFbeta CDS opt5
  source 1..564: mol_type = other RNA
atgcccagagtggtccctgaccagcggagcaagttcgagaacgaagagtttttccgcaaactgtccagagaatgcgagatcaagtacaccggctttcgggatcgcccgcacgaagagagacaagcccggttccagaatgcttgtcgcgacgggagatctgagattgcctttgttgcgacaggaacgaacctcagcctgcagttctttcccgcttcctggcagggcgaacaacggcagaccccttctcgcgagtatgtggatcttgaaagagaggccgggaaagtgtacctgaaggcccccatgatcctcaatggagtctgcgtgatttggaaaggctggatcgacctgcagcggcttgatgggatgggatgtctggagttcgacgaggaacgcgctcagcaagaagatgccctcgctcagcaggcctttgaggaagcgagacggcgcacaagagagttcgaggaccgggatagaagccatcgcgaagagatggaagcccggagacagcaagacccttcccccggctctaacctgggcgggggagatgacctgaagctccgctga

SEQ ID NO: 678 - RNA, 423 nt, synthetic construct
  misc_feature 1..423: note = Homo sapiens__Q13951-1__CBFbeta(1-141) CDS opt5
  source 1..423: mol_type = other RNA
atgcccagagtggtccctgaccagcggagcaagttcgagaacgaagagtttttccgcaaactgtccagagaatgcgagatcaagtacaccggctttcgggatcgcccgcacgaagagagacaagcccggttccagaatgcttgtcgcgacgggagatctgagattgcctttgttgcgacaggaacgaacctcagcctgcagttctttcccgcttcctggcagggcgaacaacggcagaccccttctcgcgagtatgtggatcttgaaagagaggccgggaaagtgtacctgaaggcccccatgatcctcaatggagtctgcgtgatttggaaaggctggatcgacctgcagcggcttgatgggatgggatgtctggagttcgacgaggaacgcgctcagcaagaagatgccctcgctcagcag

SEQ ID NO: 679 - RNA, 495 nt, synthetic construct
  misc_feature 1..495: note = Homo sapiens__Q13951-1__CBFbeta(1-165) CDS opt5
  source 1..495: mol_type = other RNA
atgcccagagtggtccctgaccagcggagcaagttcgagaacgaagagtttttccgcaaactgtccagagaatgcgagatcaagtacaccggctttcgggatcgcccgcacgaagagagacaagcccggttccagaatgcttgtcgcgacgggagatctgagattgcctttgttgcgacaggaacgaacctcagcctgcagttctttcccgcttcctggcagggcgaacaacggcagaccccttctcgcgagtatgtggatcttgaaagagaggccgggaaagtgtacctgaaggcccccatgatcctcaatggagtctgcgtgatttggaaaggctggatcgacctgcagcggcttgatgggatgggatgtctggagttcgacgaggaacgcgctcagcaagaagatgccctcgctcagcaggcctttgaggaagcgagacggcgcacaagagagttcgaggaccgggatagaagccatcgcgaagagatggaa

SEQ ID NO: 680 - RNA, 5919 nt, synthetic construct
  misc_feature 1..5919: note = Homo sapiens__P35749-1__SMMHC CDS opt5
  source 1..5919: mol_type = other RNA
atggcccagaagggccaactgagcgacgatgagaaattcctctttgtggacaagaacttcatcaattcccccgtcgctcaggccgattgggcggctaaaagactggtttgggtgccttctgaaaagcaggggtttgaggccgccagcattaaagaagagaagggagacgaagtggtcgtggagcttgttgagaacggcaagaaagtgaccgtcgggaaggatgacatccagaaaatgaatccgcccaagttctccaaagtggaagatatggctgagctgacatgcctcaacgaagcctctgttctgcacaatcttcgggagcgctactttagcggactgatttatacgtactccggcctcttctgtgtggtcgtgaacccttataagcatctgcccatctactctgagaagattgtggacatgtataaagggaagaaaagacacgaaatgcctccccatatctacgctatcgccgataccgcgtatcggagcatgctgcaagaccgcgaggatcagtccattctctgcacaggagaaagcggcgccggcaagaccgagaatacaaagaaggtcatccagtacctggctgttgtggcctcttcccacaaagggaagaaggacaccagcattacaggagaacttgagaaacagctgctccaagctaaccctatcctggaggcctttggcaatgcgaagaccgtgaaaaacgataattcttccagattcgggaagtttattcggatcaacttcgacgtcacgggatacattgtgggcgccaatatcgaaacctatcttctggagaaaagccgcgctatcagacaggcccgggacgaacgcacatttcatattttctactatatgatcgctggggccaaggagaagatgagatctgatctcctgctggaaggatttaacaattacaccttcctctccaacggcttcgttccgattcccgccgctcaggacgatgagatgtttcaggagacagtggaagcgatggccatcatgggcttcagcgaggaagaacaactgtccattcttaaagtcgtgtctagcgttctgcagctcgggaacatcgtgtttaagaaagaacggaataccgaccaggcttccatgcctgataacacggccgcccaaaaggtctgtcacctgatgggaatcaatgtgacagacttcacccgcagcattcttacacccagaatcaaagtcggccgggatgtggttcagaaggctcagaccaaggagcaggccgactttgcggtggaggctctggccaaagccacctatgaacgcctcttcagatggattctgacacgggtcaacaaggctctggataaaacgcacagacaaggggcctcttttctcggaatcctggacattgctggcttcgagatctttgaagttaattccttcgagcagctttgcatcaactacaccaatgagaagctgcagcagctctttaaccatacaatgttcattctggaacaagaggaatatcagcgcgaggggatcgaatggaattttattgatttcggacttgacctgcagccttgtatcgagctcattgagcggcccaacaatccgcctggcgtgctggccctgctcgacgaagagtgctggttccccaaagcgaccgataagagctttgtggaaaagctgtgtacagagcagggctctcaccctaaattccaaaagcccaaacagcttaaggacaaaaccgaatttagcatcattcattacgccgggaaggtcgattacaacgcttccgcctggctgacgaaaaatatggaccccctcaacgataatgtgacatctctgctgaacgctagctccgacaagttcgtggccgatctttggaaggacgttgatagaatcgtcggactcgaccagatggcgaaaatgaccgagagctctctgccttccgccagcaagaccaaaaagggcatgtttcgcacagtggggcagctgtataaagagcaactcggaaagctgatgaccacacttcggaacacgaccccgaatttcgtgagatgcatcattcccaaccacgaaaagcgctctggcaaactggatgcttttctcgtcctggagcagctgcggtgtaatggggtgcttgaaggcatcagaatttgccgccagggattccctaaccggatcgtttttcaagagttcagacagcgctacgaaattctcgccgctaatgccatccccaagggctttatggacgggaaacaggcctgtatcctgatgattaaggctctggagctcgatcctaacctgtatcggatcggacagtccaaaattttctttagaacaggcgtgcttgcgcacctggaggaagaacgggacctcaagatcaccgacgtcattatggccttccaagctatgtgccgcgggtacctggccagaaaggccttcgctaaacggcagcagcagctgacagccatgaaggtgatccaaagaaattgcgcggcttatcttaaactccgcaactggcagtggtggcggctgtttaccaaggttaaacccctgctccaggtgacgagacaggaagaggagatgcaagccaaggaagatgagctgcagaagaccaaagaacgccagcaaaaggccgagaatgaacttaaagagctggagcagaagcatagccagctcacagaagagaaaaacctgctgcaggaacaacttcaggctgagaccgaactctacgccgaggcggaggaaatgagagtccggctggctgccaagaaacaggagctggaagagatcctccacgaaatggaggcccgcctggaggaagaggaagacagaggacagcaacttcaggctgagcggaagaagatggcccagcagatgctggatctcgaggaacaactggaggaagaggaagctgcccgccagaaactgcagcttgagaaggtgacagcggaggccaaaattaagaaactggaagacgagatcctcgttatggatgaccagaataacaagctgtccaaggaaagaaaactcctggaggaacggatttctgatcttaccacgaatctggctgaggaggaagagaaggccaaaaacctcacaaagctgaaaaataagcatgaaagcatgatctccgagctggaagtgcgccttaagaaagaggagaagtctagacaagaactggagaaactcaagcggaaactggaaggcgacgctagcgatttccacgagcagattgccgacctccaggcccaaatcgctgagctgaagatgcagcttgcgaagaaagaagaggaactgcaggccgctctcgcccgcctggatgacgagatcgcccagaagaacaacgctctgaaaaagattagagaacttgaggggcatatctccgatctgcaagaggacctcgacagcgaacgggccgcgagaaataaagctgagaagcagaagcgcgatctgggcgaggagctcgaagccctgaaaaccgagcttgaggacacactggattctaccgccacccagcaggaactgcgggctaagagagagcaagaagtcacagtgctcaaaaaggccctggacgaggaaacgcgctcccacgaggctcaggtgcaggagatgcggcagaaacacgcgcaagccgtcgaggagcttaccgaacagctggagcagtttaagagagccaaagctaacctcgataagaataagcaaacactggagaaagaaaacgccgacctcgctggagagctgcgcgttcttggccaggccaagcaggaagtggagcataaaaagaaaaagctggaagcccaggtgcaagagctgcagagcaagtgttctgatggggagcgggcgagagctgaactcaatgacaaagtccacaagctgcagaacgaggtggaatccgttaccggaatgcttaatgaggccgaaggcaaagctattaagctggccaaagatgtggccagcctctctagccagctgcaagacacacaggagctcctgcaggaggaaacccgccagaaacttaacgtctccacgaagctgcggcaactggaggaagagagaaatagcctccaggatcagctggacgaagagatggaggctaaacagaaccttgaacggcatatctctacactgaatattcaactctccgacagcaagaaaaagctgcaggatttcgcgtccaccgtggaggccctcgaagaggggaaaaagcgctttcagaaggagatcgaaaacctgacccaacagtatgaggaaaaagctgccgcctacgacaaacttgagaaaacaaagaatagactgcagcaggaactggatgacctcgttgtggatctggacaaccaacggcagcttgtctctaatctggagaaaaagcagcgcaaattcgatcagctcctggctgaggaaaagaacattagctccaagtacgccgacgagagagatcgggcggaagctgaggccagagaaaaagagaccaaggccctgtctctcgctcgcgcccttgaggaagcgctggaggccaaagaggaactggaacggacaaacaagatgctcaaagctgagatggaggacctggtgagctccaaggatgacgttggaaagaatgtgcacgaacttgagaaatctaagagagccctggaaacgcaaatggaggagatgaaaacccagctcgaggaactggaagatgagctgcaggctacagaagacgccaagctccgccttgaggtcaacatgcaggctctgaaaggccaatttgagcgggacctgcaggccagagatgaacagaatgaggaaaagcgccggcaactccagagacagctgcacgagtatgaaaccgagcttgaggacgaacgcaagcagagagcgctggccgctgccgctaaaaagaaactcgagggggatctgaaggacctggaactccaagccgatagcgccatcaaaggccgggaggaagctatcaagcagcttcgcaagctgcaggcgcagatgaaagacttccaaagagagctggaggatgcccgggcttcccgcgacgaaatttttgccacagccaaggagaacgaaaagaaggctaaaagcctcgaggccgatctgatgcagcttcaggaggacctggcggccgctgaaagagcccggaagcaggctgatctcgagaaagaggaactggccgaggaactggcgtcttccctcagcggaagaaatgcccttcaagacgagaagcgccggctggaagctagaatcgcccagctggaggaggaactcgaagaggagcagggcaacatggaagctatgtctgatcgcgtgcggaaggccacccaacaggctgagcagctgtccaatgaacttgccacggagagaagcaccgcgcagaaaaacgaatctgcccggcaacagctggagcgccagaataaggagctcagatccaaactgcatgaaatggagggggctgtcaagagcaaattcaagtccacaattgccgctctggaagccaagatcgcccagctcgaggagcaagtggaacaggaggcgcgggaaaaacaggctgccaccaagagccttaaacagaaggacaaaaagctgaaggagattctgctccaagttgaagacgagcgcaaaatggctgagcagtacaaggaacaggccgagaaaggaaacgccagagtgaagcagctgaaacggcaacttgaagaggctgaagaggagtctcagcgcatcaatgccaacagacggaagctgcagcgcgaactcgatgaggcgacagaaagcaatgaggccatgggcagagaagtgaacgctctgaagtccaaactgcggagagggaatgagacctcttttgtcccgagccgccggtccggaggcagacgcgtgatcgagaacgccgacgggtctgaagaggaaacagatacccgggacgctgatttcaatggcacgaaggccagcgagtga

SEQ ID NO: 681 - RNA, 5940 nt, synthetic construct
  misc_feature 1..5940: note = Homo sapiens__P35749-2__SMMHC CDS opt5
  source 1..5940: mol_type = other RNA
atggcccaaaagggacaactgagcgacgatgagaaattcctctttgtggacaagaacttcattaattcccccgtcgctcaggccgattgggcggctaaaagactggtttgggtgccttctgaaaagcaggggtttgaggccgccagcattaaagaagagaagggagacgaagtggtcgtggagcttgttgagaacggcaagaaagtgacagtcgggaaggatgacatccagaaaatgaatccgcccaagttctccaaagtggaagatatggctgagctgacatgcctcaacgaagcctctgttctgcacaatcttcgggagcgctactttagcggactgatttatacgtactccggcctcttctgtgtggtcgtgaacccttataagcatctgcccatttactctgagaagattgtggacatgtataaagggaagaaaagacacgaaatgcctccccatatctacgctatcgccgataccgcgtatcggagcatgctgcaagaccgcgaggatcagtccattctctgcacaggagaaagcggcgccggcaagaccgagaataccaagaaggtcatccagtacctggctgttgtggcctcttcccacaaagggaagaaggacaccagcattacacagggaccttcttttgcttacggcgaacttgagaaacaactgctccaggccaacccgatcctggaggcgttcgggaatgccaagaccgtgaaaaacgataattccagcagatttggaaagttcattcggatcaactttgacgtcacgggctatattgtgggggctaatatcgaaacctaccttctggagaaatctcgcgccatcagacaggctcgggacgaacgcacattccatatcttttattacatgatcgccggagccaaggagaagatgagatccgatctcctgctggaaggcttcaacaattataccttcctcagcaacggctttgttcccattcctgctgcgcaggacgatgagatgttccaagagacagtggaagccatggctatcatggggttttccgaggaggaacagctgtctattcttaaagtcgtgagctccgttctgcagctcggaaacatcgtgttcaagaaagaacggaataccgaccaagccagcatgcccgataacacggccgctcagaaggtctgtcacctgatgggcatcaatgtgacagactttacccgctctattcttacacctagaatcaaagtcgggcgggatgtggttcagaaggcccagaccaaggagcaagcggacttcgctgtggaggccctggccaaagctacctacgaacgcctctttagatggattctgacacgggtcaacaaggccctggataaaacgcacagacagggagcttccttcctcggcatcctggacattgccgggtttgagatcttcgaagtgaatagctttgagcagctttgcatcaactataccaatgagaagctgcagcaactcttcaaccatacaatgtttattctggaacaggaggaataccagcgcgagggaatcgaatggaatttcattgatttcggccttgacctgcagccctgtatcgagctcattgagcggccgaacaatcctcccggcgttctggcgctgctcgacgaagagtgctggtttcctaaagccaccgataagtctttcgtggaaaagctgtgtacagagcaagggagccaccccaaatttcagaagcccaaacagcttaaggacaaaaccgagttctccatcattcattacgctggaaaggtcgattataacgcctctgcttggctgacgaaaaatatggaccctctcaacgataatgtgacaagcctgctgaacgcctccagcgacaagtttgtggcggatctttggaaggacgttgatagaatcgtcggcctcgaccagatggccaaaatgaccgagtcttccctgccgagcgcttctaagaccaaaaaggggatgttccgcacagtgggacaactgtacaaagagcagctcggcaagctgatgaccacacttcggaacacgacccccaattttgtgagatgcatcattcctaaccacgaaaagcgctccgggaaactggatgccttcctcgtcctggagcagctgcggtgtaatggcgtgcttgaaggaatcagaatttgccgccaaggctttcccaaccggatcgttttccaggagtttagacagcgctatgaaattctcgctgccaatgccatccctaaggggttcatggacggaaaacaggcttgtatcctgatgattaaggcgctggagctcgatcccaacctgtaccggatcggccaaagcaaaatctttttcagaacaggggtgcttgcccacctggaggaagaacgggacctcaagatcaccgacgtcattatggctttccaggccatgtgccgcggatatctggccagaaaggcttttgccaaacggcagcagcaactgacagcgatgaaggtgatccagagaaattgcgctgcctaccttaaactccgcaactggcagtggtggcggctgttcaccaaggttaaaccgctgctccaggtgacgagacaagaagaggagatgcaggccaaggaagatgagctgcagaagaccaaagaacgccaacagaaggctgagaatgaacttaaagagctggagcagaagcattcccagctcacagaagagaaaaacctgctgcaagaacagcttcaggccgagaccgaactctatgcggaggctgaggaaatgagagtccggctggccgccaagaaacaggagctggaagagatcctccacgaaatggaggctcgcctggaggaagaggaagacagaggccaacagcttcaggccgagcggaagaagatggctcagcaaatgctggatctcgaggaacagctggaggaagaggaagccgcgcgccagaaactgcagcttgagaaggtgacagccgaggctaaaattaagaaactggaagacgagatcctcgttatggatgaccaaaataacaagctgtctaaggaaagaaaactcctggaggaacggattagcgatcttaccacgaatctggccgaggaggaagagaaggctaaaaacctcacaaagctgaaaaataagcatgaatccatgatctctgagctggaagtgcgccttaagaaagaggaaaagagcagacaggaactggagaaactcaagcggaaactggaaggggacgcctccgattttcacgagcagattgccgacctccaagctcagatcgcggagctgaagatgcagcttgccaagaaagaagaggaactgcaggctgccctcgcccgcctggatgacgagatcgctcaaaagaacaacgccctgaaaaagattagagaacttgagggccatatcagcgatctgcaggaggacctcgactctgaacgggcggctagaaataaagccgagaagcagaagcgcgatctgggagaggaactcgaagccctgaaaaccgagcttgaggacacactggattccaccgctacccagcaagaactgcgggccaagagagagcaggaagtcacagtgctcaaaaaggcgctggacgaggaaacgcgcagccacgaggctcaggtgcaggagatgcggcaaaaacacgcccaggccgtcgaggaacttaccgaacagctggagcaattcaagagagctaaagccaacctcgataagaataagcagacactggagaaagaaaacgctgacctcgccggcgagctgcgcgttcttgggcaggcgaagcaggaagtggagcataaaaagaaaaagctggaagcccaagtgcaggagctgcagtctaagtgttccgatggagagcgggctagagccgaactcaatgacaaagtccacaagctgcagaacgaggtggaaagcgttaccggcatgcttaatgaggctgaagggaaagccattaagctggccaaagatgtggcttctctcagctcccaactgcaggacacacaggagctcctgcaggaggaaacccgccaaaaacttaacgtcagcacgaagctgcggcagctggaggaagagagaaattctctccaggatcagctggacgaagagatggaggcgaaacaaaaccttgaacggcatatctccacactgaatattcagctcagcgactccaagaaaaagctgcaggattttgcctctaccgtggaggctctcgaagagggcaagaagcgcttccaaaaggagatcgaaaacctgacccagcagtacgaggaaaaagccgccgcttacgacaaacttgagaaaacaaagaatagactgcagcaagaactggatgacctcgttgtggatctggacaaccagcggcagcttgtcagcaatctggagaaaaagcagcgcaaatttgatcaactcctggccgaggaaaagaacatttcctctaagtatgcggacgagagagatcgggctgaagccgaggccagagaaaaagagaccaaggctctgagcctcgcccgcgcgcttgaggaagccctggaggctaaagaggaactggaacggacaaacaagatgctcaaagccgagatggaggacctggtgtcctctaaggatgacgttggcaagaatgtgcacgaacttgagaaaagcaagagagctctggaaacgcagatggaggagatgaaaacccagctcgaggaactggaagatgagctgcaggccacagaagacgctaagctccgccttgaggtcaacatgcaagccctgaaagggcagttcgagcgggacctgcaggcgagagatgaacaaaatgaggaaaagcgccggcagctccagagacagctgcacgagtacgaaaccgagcttgaggacgaacgcaagcaaagagccctggctgccgctgccaaaaagaaactcgagggcgatctgaaggacctggaactccaggccgattccgctatcaaaggacgggaggaagcgatcaagcagcttcgcaagctgcaggcccaaatgaaagactttcagagagagctggaggatgctcgggccagccgcgacgaaattttcgccacagctaaggagaacgagaaaaaggccaaatctctcgaggcggatctgatgcagcttcaggaggacctggccgctgccgaaagagctcggaagcaagccgatctcgagaaagaggaactggcggaggaactggcctccagcctctctggcagaaatgcccttcaggacgagaagcgccggctggaagctagaatcgctcagctggaggaggaactcgaagaggagcaagggaacatggaagccatgtccgatcgcgtgcggaaggctacccagcaggccgagcagctgagcaatgaacttgcgacggagagatctaccgcccagaaaaacgaatccgctcggcagcagctggagcgccagaataaggagctcagaagcaaactgcatgaaatggagggagccgtgaagtccaaatttaagagcacaattgctgccctggaagccaagatcgcgcaactcgaggagcaggtcgaacaggaggctcgggaaaaacaggccgctaccaagtctcttaaacaaaaggacaaaaagctgaaggagattctgctccaggttgaagacgagcgcaaaatggccgagcagtataaggaacaggccgagaaaggcaacgctagagtgaagcaactgaaacggcagcttgaagaggccgaagaggagagccagcgcatcaatgcgaacagacggaagctgcaacgcgaactcgatgaggccacagaatccaatgaggctatggggagagaagtgaacgccctgaagtctaaactgcggagaggaaatgagaccagcttcgtcccttcccgccggtctggcgggagacgcgtgatcgagaacgctgacggcagcgaagaggaaacagatacccgggacgccgatttcaatggaacgaaggcgtccgagtga

SEQ ID NO: 682 - RNA, 5838 nt, synthetic construct
  misc_feature 1..5838: note = Homo sapiens__P35749-3__SMMHC CDS opt5
  source 1..5838: mol_type = other RNA
atggcccaaaagggacaactgagcgacgatgagaaattcctctttgtggacaagaacttcattaattcccccgtcgctcaggccgattgggcggctaaaagactggtttgggtgccttctgaaaagcaggggtttgaggccgccagcattaaagaagagaagggagacgaagtggtcgtggagcttgttgagaacggcaagaaagtgacagtcgggaaggatgacatccagaaaatgaatccgcccaagttctccaaagtggaagatatggctgagctgacatgcctcaacgaagcctctgttctgcacaatcttcgggagcgctactttagcggactgatttatacgtactccggcctcttctgtgtggtcgtgaacccttataagcatctgcccatttactctgagaagattgtggacatgtataaagggaagaaaagacacgaaatgcctccccatatctacgctatcgccgataccgcgtatcggagcatgctgcaagaccgcgaggatcagtccattctctgcacaggagaaagcggcgccggcaagaccgagaataccaagaaggtcatccagtacctggctgttgtggcctcttcccacaaagggaagaaggacaccagcattacacagggaccttcttttgcttacggcgaacttgagaaacaactgctccaggccaacccgatcctggaggcgttcgggaatgccaagaccgtgaaaaacgataattccagcagatttggaaagttcattcggatcaactttgacgtcacgggctatattgtgggggctaatatcgaaacctaccttctggagaaatctcgcgccatcagacaggctcgggacgaacgcacattccatatcttttattacatgatcgccggagccaaggagaagatgagatccgatctcctgctggaaggcttcaacaattataccttcctcagcaacggctttgttcccattcctgctgcgcaggacgatgagatgttccaagagacagtggaagccatggctatcatggggttttccgaggaggaacagctgtctattcttaaagtcgtgagctccgttctgcagctcggaaacatcgtgttcaagaaagaacggaataccgaccaagccagcatgcccgataacacggccgctcagaaggtctgtcacctgatgggcatcaatgtgacagactttacccgctctattcttacacctagaatcaaagtcgggcgggatgtggttcagaaggcccagaccaaggagcaagcggacttcgctgtggaggccctggccaaagctacctacgaacgcctctttagatggattctgacacgggtcaacaaggccctggataaaacgcacagacagggagcttccttcctcggcatcctggacattgccgggtttgagatcttcgaagtgaatagctttgagcagctttgcatcaactataccaatgagaagctgcagcaactcttcaaccatacaatgtttattctggaacaggaggaataccagcgcgagggaatcgaatggaatttcattgatttcggccttgacctgcagccctgtatcgagctcattgagcggccgaacaatcctcccggcgttctggcgctgctcgacgaagagtgctggtttcctaaagccaccgataagtctttcgtggaaaagctgtgtacagagcaagggagccaccccaaatttcagaagcccaaacagcttaaggacaaaaccgagttctccatcattcattacgctggaaaggtcgattataacgcctctgcttggctgacgaaaaatatggaccctctcaacgataatgtgacaagcctgctgaacgcctccagcgacaagtttgtggcggatctttggaaggacgttgatagaatcgtcggcctcgaccagatggccaaaatgaccgagtcttccctgccgagcgcttctaagaccaaaaaggggatgttccgcacagtgggacaactgtacaaagagcagctcggcaagctgatgaccacacttcggaacacgacccccaattttgtgagatgcatcattcctaaccacgaaaagcgctccgggaaactggatgccttcctcgtcctggagcagctgcggtgtaatggcgtgcttgaaggaatcagaatttgccgccaaggctttcccaaccggatcgttttccaggagtttagacagcgctatgaaattctcgctgccaatgccatccctaaggggttcatggacggaaaacaggcttgtatcctgatgattaaggcgctggagctcgatcccaacctgtaccggatcggccaaagcaaaatctttttcagaacaggggtgcttgcccacctggaggaagaacgggacctcaagatcaccgacgtcattatggctttccaggccatgtgccgcggatatctggccagaaaggcttttgccaaacggcagcagcaactgacagcgatgaaggtgatccagagaaattgcgctgcctaccttaaactccgcaactggcagtggtggcggctgttcaccaaggttaaaccgctgctccaggtgacgagacaagaagaggagatgcaggccaaggaagatgagctgcagaagaccaaagaacgccaacagaaggctgagaatgaacttaaagagctggagcagaagcattcccagctcacagaagagaaaaacctgctgcaagaacagcttcaggccgagaccgaactctatgcggaggctgaggaaatgagagtccggctggccgccaagaaacaggagctggaagagatcctccacgaaatggaggctcgcctggaggaagaggaagacagaggccaacagcttcaggccgagcggaagaagatggctcagcaaatgctggatctcgaggaacagctggaggaagaggaagccgcgcgccagaaactgcagcttgagaaggtgacagccgaggctaaaattaagaaactggaagacgagatcctcgttatggatgaccaaaataacaagctgtctaaggaaagaaaactcctggaggaacggattagcgatcttaccacgaatctggccgaggaggaagagaaggctaaaaacctcacaaagctgaaaaataagcatgaatccatgatctctgagctggaagtgcgccttaagaaagaggaaaagagcagacaggaactggagaaactcaagcggaaactggaaggggacgcctccgattttcacgagcagattgccgacctccaagctcagatcgcggagctgaagatgcagcttgccaagaaagaagaggaactgcaggctgccctcgcccgcctggatgacgagatcgctcaaaagaacaacgccctgaaaaagattagagaacttgagggccatatcagcgatctgcaggaggacctcgactctgaacgggcggctagaaataaagccgagaagcagaagcgcgatctgggagaggaactcgaagccctgaaaaccgagcttgaggacacactggattccaccgctacccagcaagaactgcgggccaagagagagcaggaagtcacagtgctcaaaaaggcgctggacgaggaaacgcgcagccacgaggctcaggtgcaggagatgcggcaaaaacacgcccaggccgtcgaggaacttaccgaacagctggagcaattcaagagagctaaagccaacctcgataagaataagcagacactggagaaagaaaacgctgacctcgccggcgagctgcgcgttcttgggcaggcgaagcaggaagtggagcataaaaagaaaaagctggaagcccaagtgcaggagctgcagtctaagtgttccgatggagagcgggctagagccgaactcaatgacaaagtccacaagctgcagaacgaggtggaaagcgttaccggcatgcttaatgaggctgaagggaaagccattaagctggccaaagatgtggcttctctcagctcccaactgcaggacacacaggagctcctgcaggaggaaacccgccaaaaacttaacgtcagcacgaagctgcggcagctggaggaagagagaaattctctccaggatcagctggacgaagagatggaggcgaaacaaaaccttgaacggcatatctccacactgaatattcagctcagcgactccaagaaaaagctgcaggattttgcctctaccgtggaggctctcgaagagggcaagaagcgcttccaaaaggagatcgaaaacctgacccagcagtacgaggaaaaagccgccgcttacgacaaacttgagaaaacaaagaatagactgcagcaagaactggatgacctcgttgtggatctggacaaccagcggcagcttgtcagcaatctggagaaaaagcagcgcaaatttgatcaactcctggccgaggaaaagaacatttcctctaagtatgcggacgagagagatcgggctgaagccgaggccagagaaaaagagaccaaggctctgagcctcgcccgcgcgcttgaggaagccctggaggctaaagaggaactggaacggacaaacaagatgctcaaagccgagatggaggacctggtgtcctctaaggatgacgttggcaagaatgtgcacgaacttgagaaaagcaagagagctctggaaacgcagatggaggagatgaaaacccagctcgaggaactggaagatgagctgcaggccacagaagacgctaagctccgccttgaggtcaacatgcaagccctgaaagggcagttcgagcgggacctgcaggcgagagatgaacaaaatgaggaaaagcgccggcagctccagagacagctgcacgagtacgaaaccgagcttgaggacgaacgcaagcaaagagccctggctgccgctgccaaaaagaaactcgagggcgatctgaaggacctggaactccaggccgattccgctatcaaaggacgggaggaagcgatcaagcagcttcgcaagctgcaggcccaaatgaaagactttcagagagagctggaggatgctcgggccagccgcgacgaaattttcgccacagctaaggagaacgagaaaaaggccaaatctctcgaggcggatctgatgcagcttcaggaggacctggccgctgccgaaagagctcggaagcaagccgatctcgagaaagaggaactggcggaggaactggcctccagcctctctggcagaaatgcccttcaggacgagaagcgccggctggaagctagaatcgctcagctggaggaggaactcgaagaggagcaagggaacatggaagccatgtccgatcgcgtgcggaaggctacccagcaggccgagcagctgagcaatgaacttgcgacggagagatctaccgcccagaaaaacgaatccgctcggcagcagctggagcgccagaataaggagctcagaagcaaactgcatgaaatggagggagccgtgaagtccaaatttaagagcacaattgctgccctggaagccaagatcgcgcaactcgaggagcaggtcgaacaggaggctcgggaaaaacaggccgctaccaagtctcttaaacaaaaggacaaaaagctgaaggagattctgctccaggttgaagacgagcgcaaaatggccgagcagtataaggaacaggccgagaaaggcaacgctagagtgaagcaactgaaacggcagcttgaagaggccgaagaggagagccagcgcatcaatgcgaacagacggaagctgcaacgcgaactcgatgaggccacagaatccaatgaggctatggggagagaagtgaacgccctgaagtctaaactgcggggacctccccctcaggagaccagccagtga

SEQ ID NO: 683 - RNA, 5817 nt, synthetic construct
  misc_feature 1..5817: note = Homo sapiens__P35749-4__SMMHC CDS opt5
  source 1..5817: mol_type = other RNA
atggcccagaagggccaactgagcgacgatgagaaattcctctttgtggacaagaacttcatcaattcccccgtcgctcaggccgattgggcggctaaaagactggtttgggtgccttctgaaaagcaggggtttgaggccgccagcattaaagaagagaagggagacgaagtggtcgtggagcttgttgagaacggcaagaaagtgaccgtcgggaaggatgacatccagaaaatgaatccgcccaagttctccaaagtggaagatatggctgagctgacatgcctcaacgaagcctctgttctgcacaatcttcgggagcgctactttagcggactgatttatacgtactccggcctcttctgtgtggtcgtgaacccttataagcatctgcccatctactctgagaagattgtggacatgtataaagggaagaaaagacacgaaatgcctccccatatctacgctatcgccgataccgcgtatcggagcatgctgcaagaccgcgaggatcagtccattctctgcacaggagaaagcggcgccggcaagaccgagaatacaaagaaggtcatccagtacctggctgttgtggcctcttcccacaaagggaagaaggacaccagcattacaggagaacttgagaaacagctgctccaagctaaccctatcctggaggcctttggcaatgcgaagaccgtgaaaaacgataattcttccagattcgggaagtttattcggatcaacttcgacgtcacgggatacattgtgggcgccaatatcgaaacctatcttctggagaaaagccgcgctatcagacaggcccgggacgaacgcacatttcatattttctactatatgatcgctggggccaaggagaagatgagatctgatctcctgctggaaggatttaacaattacaccttcctctccaacggcttcgttccgattcccgccgctcaggacgatgagatgtttcaggagacagtggaagcgatggccatcatgggcttcagcgaggaagaacaactgtccattcttaaagtcgtgtctagcgttctgcagctcgggaacatcgtgtttaagaaagaacggaataccgaccaggcttccatgcctgataacacggccgcccaaaaggtctgtcacctgatgggaatcaatgtgacagacttcacccgcagcattcttacacccagaatcaaagtcggccgggatgtggttcagaaggctcagaccaaggagcaggccgactttgcggtggaggctctggccaaagccacctatgaacgcctcttcagatggattctgacacgggtcaacaaggctctggataaaacgcacagacaaggggcctcttttctcggaatcctggacattgctggcttcgagatctttgaagttaattccttcgagcagctttgcatcaactacaccaatgagaagctgcagcagctctttaaccatacaatgttcattctggaacaagaggaatatcagcgcgaggggatcgaatggaattttattgatttcggacttgacctgcagccttgtatcgagctcattgagcggcccaacaatccgcctggcgtgctggccctgctcgacgaagagtgctggttccccaaagcgaccgataagagctttgtggaaaagctgtgtacagagcagggctctcaccctaaattccaaaagcccaaacagcttaaggacaaaaccgaatttagcatcattcattacgccgggaaggtcgattacaacgcttccgcctggctgacgaaaaatatggaccccctcaacgataatgtgacatctctgctgaacgctagctccgacaagttcgtggccgatctttggaaggacgttgatagaatcgtcggactcgaccagatggcgaaaatgaccgagagctctctgccttccgccagcaagaccaaaaagggcatgtttcgcacagtggggcagctgtataaagagcaactcggaaagctgatgaccacacttcggaacacgaccccgaatttcgtgagatgcatcattcccaaccacgaaaagcgctctggcaaactggatgcttttctcgtcctggagcagctgcggtgtaatggggtgcttgaaggcatcagaatttgccgccagggattccctaaccggatcgtttttcaagagttcagacagcgctacgaaattctcgccgctaatgccatccccaagggctttatggacgggaaacaggcctgtatcctgatgattaaggctctggagctcgatcctaacctgtatcggatcggacagtccaaaattttctttagaacaggcgtgcttgcgcacctggaggaagaacgggacctcaagatcaccgacgtcattatggccttccaagctatgtgccgcgggtacctggccagaaaggccttcgctaaacggcagcagcagctgacagccatgaaggtgatccaaagaaattgcgcggcttatcttaaactccgcaactggcagtggtggcggctgtttaccaaggttaaacccctgctccaggtgacgagacaggaagaggagatgcaagccaaggaagatgagctgcagaagaccaaagaacgccagcaaaaggccgagaatgaacttaaagagctggagcagaagcatagccagctcacagaagagaaaaacctgctgcaggaacaacttcaggctgagaccgaactctacgccgaggcggaggaaatgagagtccggctggctgccaagaaacaggagctggaagagatcctccacgaaatggaggcccgcctggaggaagaggaagacagaggacagcaacttcaggctgagcggaagaagatggcccagcagatgctggatctcgaggaacaactggaggaagaggaagctgcccgccagaaactgcagcttgagaaggtgacagcggaggccaaaattaagaaactggaagacgagatcctcgttatggatgaccagaataacaagctgtccaaggaaagaaaactcctggaggaacggatttctgatcttaccacgaatctggctgaggaggaagagaaggccaaaaacctcacaaagctgaaaaataagcatgaaagcatgatctccgagctggaagtgcgccttaagaaagaggagaagtctagacaagaactggagaaactcaagcggaaactggaaggcgacgctagcgatttccacgagcagattgccgacctccaggcccaaatcgctgagctgaagatgcagcttgcgaagaaagaagaggaactgcaggccgctctcgcccgcctggatgacgagatcgcccagaagaacaacgctctgaaaaagattagagaacttgaggggcatatctccgatctgcaagaggacctcgacagcgaacgggccgcgagaaataaagctgagaagcagaagcgcgatctgggcgaggagctcgaagccctgaaaaccgagcttgaggacacactggattctaccgccacccagcaggaactgcgggctaagagagagcaagaagtcacagtgctcaaaaaggccctggacgaggaaacgcgctcccacgaggctcaggtgcaggagatgcggcagaaacacgcgcaagccgtcgaggagcttaccgaacagctggagcagtttaagagagccaaagctaacctcgataagaataagcaaacactggagaaagaaaacgccgacctcgctggagagctgcgcgttcttggccaggccaagcaggaagtggagcataaaaagaaaaagctggaagcccaggtgcaagagctgcagagcaagtgttctgatggggagcgggcgagagctgaactcaatgacaaagtccacaagctgcagaacgaggtggaatccgttaccggaatgcttaatgaggccgaaggcaaagctattaagctggccaaagatgtggccagcctctctagccagctgcaagacacacaggagctcctgcaggaggaaacccgccagaaacttaacgtctccacgaagctgcggcaactggaggaagagagaaatagcctccaggatcagctggacgaagagatggaggctaaacagaaccttgaacggcatatctctacactgaatattcaactctccgacagcaagaaaaagctgcaggatttcgcgtccaccgtggaggccctcgaagaggggaaaaagcgctttcagaaggagatcgaaaacctgacccaacagtatgaggaaaaagctgccgcctacgacaaacttgagaaaacaaagaatagactgcagcaggaactggatgacctcgttgtggatctggacaaccaacggcagcttgtctctaatctggagaaaaagcagcgcaaattcgatcagctcctggctgaggaaaagaacattagctccaagtacgccgacgagagagatcgggcggaagctgaggccagagaaaaagagaccaaggccctgtctctcgctcgcgcccttgaggaagcgctggaggccaaagaggaactggaacggacaaacaagatgctcaaagctgagatggaggacctggtgagctccaaggatgacgttggaaagaatgtgcacgaacttgagaaatctaagagagccctggaaacgcaaatggaggagatgaaaacccagctcgaggaactggaagatgagctgcaggctacagaagacgccaagctccgccttgaggtcaacatgcaggctctgaaaggccaatttgagcgggacctgcaggccagagatgaacagaatgaggaaaagcgccggcaactccagagacagctgcacgagtatgaaaccgagcttgaggacgaacgcaagcagagagcgctggccgctgccgctaaaaagaaactcgagggggatctgaaggacctggaactccaagccgatagcgccatcaaaggccgggaggaagctatcaagcagcttcgcaagctgcaggcgcagatgaaagacttccaaagagagctggaggatgcccgggcttcccgcgacgaaatttttgccacagccaaggagaacgaaaagaaggctaaaagcctcgaggccgatctgatgcagcttcaggaggacctggcggccgctgaaagagcccggaagcaggctgatctcgagaaagaggaactggccgaggaactggcgtcttccctcagcggaagaaatgcccttcaagacgagaagcgccggctggaagctagaatcgcccagctggaggaggaactcgaagaggagcagggcaacatggaagctatgtctgatcgcgtgcggaaggccacccaacaggctgagcagctgtccaatgaacttgccacggagagaagcaccgcgcagaaaaacgaatctgcccggcaacagctggagcgccagaataaggagctcagatccaaactgcatgaaatggagggggctgtcaagagcaaattcaagtccacaattgccgctctggaagccaagatcgcccagctcgaggagcaagtggaacaggaggcgcgggaaaaacaggctgccaccaagagccttaaacagaaggacaaaaagctgaaggagattctgctccaagttgaagacgagcgcaaaatggctgagcagtacaaggaacaggccgagaaaggaaacgccagagtgaagcagctgaaacggcaacttgaagaggctgaagaggagtctcagcgcatcaatgccaacagacggaagctgcagcgcgaactcgatgaggcgacagaaagcaatgaggccatgggcagagaagtgaacgctctgaagtccaaactgcgggggccgcctccccaagagacctctcagtga

SEQ ID NO: 684 - RNA, 1338 nt, synthetic construct
  misc_feature 1..1338: note = Homo sapiens__P35749-1__SMMHC(1527-1972) CDS opt5
  source 1..1338: mol_type = other RNA
gtgcacgagctggaaaagagcaaaagagccctcgagacccagatggaagagatgaagacacaactggaggagcttgaggacgaactgcaggctacggaggatgccaaactccggctggaagtcaacatgcaggcgcttaagggccagttcgagcgcgacctgcaagctagagatgagcagaatgaagagaaacggcgccagctccagagacaactgcatgaatacgagaccgaactggaggacgagcggaagcagcgcgccctcgccgctgccgctaagaaaaagctggaaggggatcttaaagacctggagctccaggccgattccgcgatcaagggaagagaagaggccattaaacagctgcggaaacttcaagctcagatgaaggactttcagcgcgaactggaggatgccagagcttctcgggacgagatcttcgccacagcgaaggaaaacgagaagaaagccaagagcctcgaagctgatctgatgcaactgcaggaggacctcgccgctgccgaacgcgccagaaaacaggctgatctggagaaggaggaacttgcggaggaactggcctcctctctcagcggccggaatgctctgcaggacgagaaacgcagacttgaggcccggattgcccaactggaagaggaactcgaggaggaacaggggaacatggaggctatgtccgacagagttcgcaaggccacccagcaggcggaacaactgtctaatgagctggctacagaacggagcaccgcccagaagaacgagtccgccagacagcagctcgaacgccaaaataaagagctgcggagcaaacttcacgagatggaaggagctgtgaagtctaagtttaaatccacaatcgccgctctggaggccaagattgcgcagctcgaagaacaggtggaacaggaggccagagagaagcaagctgccaccaaaagcctgaagcagaaagataagaaacttaaggaaatcctgctccaggtcgaggacgaacgcaagatggctgagcaatataaagagcaggccgaaaagggcaacgcgcgggtgaaacagctgaagagacagctggaggaagccgaggaagagtctcaacgcatcaatgctaaccggagaaaactccagcgcgagctggatgaagccacggagtccaatgaagctatggggcgggaggttaacgcccttaagagcaagctgagacggggaaatgaaacctctttcgtgccctcccgcagaagcggcggccggagagtcattgagaacgccgacgggtccgaggaagagacagatacccgcgacgctgattttaatggaacaaaagcgtctgaa

SEQ ID NO: 685 - RNA, 1053 nt, synthetic construct
  misc_feature 1..1053: note = Homo sapiens__P35749-1__SMMHC(1527-1877) CDS opt5
  source 1..1053: mol_type = other RNA
gtgcacgagctggaaaagagcaaaagagccctcgagacccagatggaagagatgaagacacaactggaggagcttgaggacgaactgcaggctacggaggatgccaaactccggctggaagtcaacatgcaggcgcttaagggccagttcgagcgcgacctgcaagctagagatgagcagaatgaagagaaacggcgccagctccagagacaactgcatgaatacgagaccgaactggaggacgagcggaagcagcgcgccctcgccgctgccgctaagaaaaagctggaaggggatcttaaagacctggagctccaggccgattccgcgatcaagggaagagaagaggccattaaacagctgcggaaacttcaagctcagatgaaggactttcagcgcgaactggaggatgccagagcttctcgggacgagatcttcgccacagcgaaggaaaacgagaagaaagccaagagcctcgaagctgatctgatgcaactgcaggaggacctcgccgctgccgaacgcgccagaaaacaggctgatctggagaaggaggaacttgcggaggaactggcctcctctctcagcggccggaatgctctgcaggacgagaaacgcagacttgaggcccggattgcccaactggaagaggaactcgaggaggaacaggggaacatggaggctatgtccgacagagttcgcaaggccacccagcaggcggaacaactgtctaatgagctggctacagaacggagcaccgcccagaagaacgagtccgccagacagcagctcgaacgccaaaataaagagctgcggagcaaacttcacgagatggaaggagctgtgaagtctaagtttaaatccacaatcgccgctctggaggccaagattgcgcagctcgaagaacaggtggaacaggaggccagagagaagcaagctgccaccaaaagcctgaagcagaaagataagaaacttaaggaaatcctgctccaggtcgaggacgaacgcaagatggctgagcaatataaagagcaggccgaaaagggcaacgcg

SEQ ID NO: 686 - RNA, 492 nt, synthetic construct
  misc_feature 1..492: note = Homo sapiens__P35749-1__SMMHC(1809-1972) CDS opt5
  source 1..492: mol_type = other RNA
aagagcaaattcaagtccaccatcgccgctctggaggccaaaattgcgcagctcgaggaacaagtggaacaggaggctagagaaaagcaggccgccacaaaatctctgaagcagaaggacaaaaagctgaaagagatccttctccaagtcgaggatgaacggaagatggctgagcagtacaaagaacaggccgagaagggcaacgctcgcgttaagcagctgaaaagacaacttgaggaagccgaggaagagagccagcggattaatgcgaaccgcagaaagctgcagcgggaactcgacgaggccacggagtccaatgaagctatggggcgcgaggtgaacgccctgaaatctaagctgagacggggaaatgaaaccagctttgtgccctcccgcagatctggcgggcggcgcgtcatcgagaacgctgatggaagcgaagaggagacagacaccagagatgccgacttcaatggcacaaaagcgtccgaa

SEQ ID NO: 687 - RNA, 207 nt, synthetic construct
  misc_feature 1..207: note = Homo sapiens__P35749-1__SMMHC(1809-1877) CDS opt5
  source 1..207: mol_type = other RNA
aagagcaaattcaagtccaccatcgccgctctggaggccaaaattgcgcagctcgaggaacaagtggaacaggaggctagagaaaagcaggccgccacaaaatctctgaagcagaaggacaaaaagctgaaagagatccttctccaagtcgaggatgaacggaagatggctgagcagtacaaagaacaggccgagaagggcaacgct

SEQ ID NO: 688 - RNA, 69 nt, synthetic construct; identical to SEQ ID NO: 564
  misc_feature 1..69: note = Artificial____Lifeact CDS opt5
  source 1..69: mol_type = other RNA

SEQ ID NO: 689 - RNA, 51 nt, synthetic construct; identical to SEQ ID NO: 565
  misc_feature 1..51: note = Saccharomyces cerevisiae S288C__NP_014882.4__Lifeact(1-17) CDS opt5
  source 1..51: mol_type = other RNA

SEQ ID NO: 690 - RNA, 2481 nt, synthetic construct
  misc_feature 1..2481: note = Homo sapiens__Q16665-1__HIF1alpha CDS opt5
  source 1..2481: mol_type = other RNA
atggagggcgccgggggagctaacgacaagaaaaagatcagctccgaaagacggaaagagaagtctcgcgatgccgcgagaagccggcgctccaaagaatctgaggtgttctacgaactggctcaccagctccccctgcctcataatgtcagctcccaccttgacaaggcctctgttatgagactgaccattagctatctccgggtgcgcaagctgcttgatgccggcgacctggatatcgaggacgatatgaaagctcaaatgaactgcttttacctcaaggccctggacgggttcgtgatggtcctgacagatgacggagatatgatttatatctccgacaatgtgaacaaatacatgggcctcacgcagtttgagctgaccgggcatagcgttttcgattttacacacccgtgtgaccatgaagagatgagagaaatgcttacccaccggaatggactggtgaagaaaggcaaggagcagaacacacagcgctctttctttctcagaatgaagtgcaccctgacatcccggggccgcaccatgaatattaaaagcgctacgtggaaggtccttcactgtaccgggcatatccacgtgtatgacacaaactctaatcaaccccagtgcggatacaaaaagcctcccatgacctgtctggttctcatctgcgagcctattccccatccttccaacatcgaaattccgctggatagcaaaacattcctgtctagacactccctcgacatgaagtttagctattgtgatgagcggatcaccgaactgatgggctacgagcccgaggaacttctggggcgctccatttacgagtattaccacgccctcgactctgatcatctgacgaaaacacaccatgacatgttcaccaagggacaggtgacaaccggccagtatagaatgcttgcgaagagagggggatacgtctgggtggaaacccaagccacagtgatctataatacgaaaaacagccagcctcagtgcattgtctgtgttaattacgtggtgtccggcatcatccagcacgatctgatttttagcctccaacagaccgagtgcgtcctgaagcccgtggaatcttccgacatgaaaatgacacagctgttcaccaaggttgagagcgaagatacatctagcctctttgacaaactgaagaaggagcctgatgctcttaccctgctcgcccccgctgccggcgacacgatcatttccctggacttcgggtctaacgatacagagaccgacgatcaacagcttgaagaggtgccgctgtataatgacgtcatgctccctagccccaacgaaaaactgcagaacatcaatctggcgatgtcccctctccccaccgccgagacacccaagcctctgcggagctctgctgatccggcccttaaccaggaagtggctctgaaactcgagcccaatcctgagtccctggaactgagcttcaccatgccccaaattcaggaccagacaccttctccctccgatggaagcacgcgccagtcctctccggagcctaacagcccctccgaatactgtttttacgttgactctgatatggtgaatgagttcaaacttgagctcgtcgaaaagctgtttgccgaggacaccgaagccaagaaccctttcagcacacaagataccgacctggatctcgagatgctggctccctatatccctatggacgacgattttcagcttcggtccttcgaccagctgagccccctcgaatcttccagcgcgtctccggagtccgccagccctcagtctacagtgaccgtctttcaacagacgcagatccaggagcccaccgctaatgccacaaccacaaccgccacgacagatgaactgaagaccgtgacaaaagacagaatggaggatattaagatcctgattgctagcccctcccctacccatatccacaaagaaaccacaagcgccacgtcttccccgtaccgcgacacccaaagccggacagcgtcccccaacagagctggcaagggggttattgagcagaccgaaaaatctcaccctcgcagccccaatgtgctttccgtcgccctctctcagcggacaaccgtgcctgaggaggaactgaaccccaagatcctggccctccaaaatgctcagagaaagcgcaaaatggagcatgatggaagcctgttccaggccgttggcatcgggacgcttctgcagcaacctgacgatcacgctgccacaacctccctctcttggaagcgggtgaaaggatgcaagagctccgaacagaacggcatggagcagaaaaccattatcctgattcccagcgacctggcgtgcagacttctcggccagtctatggatgaatccgggctgccgcaactgacaagctatgactgtgaggtcaatgcccctatccagggatctcgcaacctcctgcagggcgaggaacttctgcgggctctcgatcaggtgaattga

SEQ ID NO: 691 - RNA, 81 nt, synthetic construct
  misc_feature 1..81: note = Homo sapiens__Q16665-1__HIF1alpha(549-575) CDS opt5
  source 1..81: mol_type = other RNA
cccttcagcacccaggacacagatctggacctcgagatgctggccccttacatcccgatggatgacgattttcaacttaga

SEQ ID NO: 692 - RNA, 45 nt, synthetic construct
  misc_feature 1..45: note = Artificial____Linker CDS opt5
  source 1..45: mol_type = other RNA
ggcgggagcggaggctccgggggatctggcgggagcggaggcggc

SEQ ID NO: 693 - RNA, 1362 nt, synthetic construct
  misc_feature 1..1362: note = Homo sapiens__Q01196-1__RUNX1(K83E_R174Q) CDS opt5
  source 1..1362: mol_type = other RNA
atgagaatccccgtggacgccagcacctcccggcgcttcacacctccgtctacggctctgagccccggcaagatgtccgaggccctccctctgggggcgcccgatgctggagccgcccttgctggcaaactgagatctggggaccggagcatggtcgaagttctcgccgatcaccctggagagctggtgcgcaccgactcccccaactttctttgctctgtgctgcctacacattggagatgtaatgaaaccctcccgattgctttcaaggtcgtggccctgggcgatgttcccgacgggacactggtgaccgtcatggcgggaaacgatgagaattacagcgccgaactccggaacgctacagccgctatgaaaaatcaggtggcccgctttaacgacctgagattcgttggccggtccggccgcggaaagagctttacccttacgatcaccgtgttcacaaatcctccccaagtcgcgacctatcacagagccattaaaatcacagtggatgggcctcaggagccccggcgccatagacagaagctggacgatcagaccaagccgggctctctctcctttagcgagcggctgtctgaacttgagcaactgcgcagaacggctatgcgggtgtcccctcaccatcccgcccctacacccaaccccagagctagcctcaatcactctaccgccttcaaccctcagccgcagtcccagatgcaagacacacgccagattcagcccagccctccctggtcctacgatcagtcttatcaatacctggggagcatcgcctcccctagcgtccaccccgctaccccgatctctcctggacgggcgtccggcatgaccacactgagcgccgaactctctagcagactgtccacggctcccgaccttaccgccttttctgaccctcgccagttccccgccctgcctagcatttccgatccccggatgcattatccgggggcttttacatacagccctacccccgttacatctggaatcggcattggcatgtccgccatggggagcgcgaccagatatcacacgtacctgccccctccgtaccccggatcttcccaggctcaaggcgggcctttccaggccagctccccctcttatcatctctactatggagccagcgctggctcctaccagttttctatggtcgggggagagcgcagccctccccggatccttcctccctgcacaaatgcctccaccggcagcgctctgctcaacccgtctctgcctaatcagtccgacgtggtggaggccgaaggcagccactctaactcccccaccaatatggcgcctagcgccagactggaggaagctgtgtggcgcccctattga

SEQ ID NO: 694 - RNA, 1362 nt, synthetic construct
  misc_feature 1..1362: note = Homo sapiens__Q01196-1__RUNX1 CDS opt5
  source 1..1362: mol_type = other RNA
atgagaatccccgtggacgccagcacctcccggcgcttcacacctccgtctacggctctgagccccggcaagatgtccgaggccctccctctgggggcgcccgatgctggagccgcccttgctggcaaactgagatctggggaccggagcatggtcgaagttctcgccgatcaccctggagagctggtgcgcaccgactcccccaactttctttgctctgtgctgcctacacattggagatgtaataagaccctcccgattgctttcaaagtcgtggccctgggcgatgttcccgacgggacactggtgaccgtcatggcgggaaacgatgaaaattacagcgccgagctccggaacgctacagccgctatgaagaatcaggtggcccgctttaacgacctgagattcgttggccggtccggccgcgggaaatcttttacccttacgatcaccgtgttcacaaatcctccccaagtcgcgacctatcacagagccattaagatcacagtggatggacctcgggaaccccgcagacatcggcagaagctggacgatcagaccaaaccgggcagcctctcctttagcgagcgcctgtctgagcttgaacagctgagacggacggctatgagagtgtcccctcaccatcccgcccctacacccaacccccgcgctagcctcaatcactctaccgccttcaaccctcaaccgcagtcccagatgcaggacacacggcaaattcagcccagccctccctggtcctacgatcagtcttatcagtacctggggagcatcgcctcccctagcgtccaccccgctaccccgatctctcctgggagagcgtccggcatgaccacactgagcgccgagctctctagccgcctgtccacggctcccgaccttaccgccttttctgaccctcggcaattccccgccctgcctagcatttccgatcccagaatgcattatccgggggcttttacatacagccctacccccgttacatctggaatcggcattggcatgtccgccatggggagcgcgacccgctatcacacgtacctgccccctccgtaccccggatcttcccaggctcagggcgggcctttccaagccagctccccctcttatcatctctactatggagccagcgctggctcctaccagttttctatggtgggaggagaacggagccctcccagaatccttcctccctgcacaaatgcctccaccggcagcgctctgctcaacccgtctctgcctaatcagtccgacgtggtcgaggccgagggcagccactctaactcccccaccaatatggcgcctagcgcccgcctggaagaggctgtgtggcggccctattga

SEQ ID NO: 695 - RNA, 1443 nt, synthetic construct
  misc_feature 1..1443: note = Homo sapiens__Q01196-8__RUNX1 CDS opt5
  source 1..1443: mol_type = other RNA
atggccagcgactccatcttcgagtcttttcccagctaccctcagtgcttcatgagagaatgtattctgggcatgaacccgtcccgggatgtgcacgacgcttctaccagccgcagatttacacccccttccacggccctctctcccgggaagatgagcgaggcgctgcctcttggagctcccgatgccggcgccgctctggccgggaaactccggtccggagaccgcagcatggtcgaagttctggctgatcatcctggcgagcttgtgagaaccgactctccgaatttcctgtgctccgtgctccccacacactggcggtgtaacaagaccctgcctatcgcctttaaagtcgtggcgctgggggatgttcccgacggaacactcgtgaccgtcatggccggcaatgatgaaaactatagcgctgagctgcgcaatgccacagctgccatgaagaaccaagtggcgagattcaatgaccttcggtttgttggccgctctgggagaggaaaatccttcaccctgacgattaccgtgtttacaaaccctccccaggtcgccacctaccatcgggctatcaagattacagtggatggcccgcgcgagcctagacggcaccgccagaagctcgacgatcagaccaaacccgggagcctgtctttctccgaaagacttagcgagctggaacaactccggagaacggccatgcgcgtgtcccctcatcaccccgctcccacacctaatccgcgggcctctctgaaccacagcaccgcctttaatccccagcctcagtcccagatgcaagacacaagacagatccagcccagccctccctggtcttatgaccagtcctaccaatatctgggaagcatcgcttctccgagcgtccatcctgcgacccccatttcccctggccgcgcctctgggatgaccacactcagcgctgagctgtccagccggctttctacggcccccgatctgaccgccttctccgaccctagacagtttcccgctctcccgagcatctctgatcctcgcatgcactaccccggagccttcacatattcccccacccctgttacaagcggcattggcatcgggatgtccgcgatgggatctgctacccggtaccatacgtacctgccgcccccttatcccggcagctcccaggcccaagggggacctttccaggcctctagcccctcctaccacctttattacggcgctagcgccgggtcttatcagttttccatggtgggaggcgagagaagccctccccgcattctgccgccttgcacaaacgcttctaccggctccgccctcctgaatcccagcctgcctaaccagtctgacgtggtcgaagcggaggggagccactccaatagccccaccaacatggccccgtctgctcggctcgaagaggccgtgtggagaccttactga

SEQ ID NO: 696 - RNA, 1419 nt, synthetic construct
  misc_feature 1..1419: note = Homo sapiens__Q01196-2__RUNX1 CDS opt5
  source 1..1419: mol_type = other RNA
atgagaatccccgtggacgccagcacctcccggcgcttcacacctccgtctacggctctgagccccggcaagatgtccgaggccctccctctgggggcgcccgatgctggagccgcccttgctggcaaactgagatctggggaccggagcatggtcgaagttctcgccgatcaccctggagagctggtgcgcaccgactcccccaactttctttgctctgtgctgcctacacattggagatgtaataagaccctcccgattgctttcaaagtcgtggccctgggcgatgttcccgacgggacactggtgaccgtcatggcgggaaacgatgaaaattacagcgccgagctccggaacgctacagccgctatgaagaatcaggtggcccgctttaacgacctgagattcgttggccggtccggccgcgggaaatcttttacccttacgatcaccgtgttcacaaatcctccccaagtcgcgacctatcacagagccattaagatcacagtggatggacctcgggaaccccgcagacatcggcagaagctggacgatcagaccaaaccgggcagcctctcctttagcgagcgcctgtctgagcttgaacagctgagacggacggctatgagagtgtcccctcaccatcccgcccctacacccaacccccgcgctagcctcaatcactctaccgccttcaaccctcaaccgcagtcccagatgcaggacacacggcaaattcagcccagccctccctggtcctacgatcagtcttatcagtacctggggagcatcgcctcccctagcgtccaccccgctaccccgatctctcctgggagagcgtccggcatgaccacactgagcgccgagctctctagccgcctgtccacggctcccgaccttaccgccttttctgaccctcggcaattccccgccctgcctagcatttccgatcccagaatgcattatccgggggcttttacatacagccctacccccgttacatctggaatcggcattggcatgtccgccatggggagcgcgacccgctatcacacgtacctgccccctccgtaccccggatcttcccaggctcagggcgggcctttccaagccagctccccctcttatcatctctactatggagccagcgctggctcctaccagttttctatggtcgggggagaacggagccctcccagaatccttcctccctgcacaaatgcctccaccggcagcgctctgctcaacccgtctctgcctaatcagtccgacgtggtggaggccgagggcagccactctaactcccccaccaatatgggaggagcgagctgttctcgccaggcccggagagatcctggcccctgggctcgcacaccgagctgggggcggggaagacctaccgaccggatttccctgtga

SEQ ID NO: 697 - RNA, 1419 nt, synthetic construct
  misc_feature 1..1419: note = Homo sapiens__CAA56092.1__RUNX1 CDS opt5
  source 1..1419: mol_type = other RNA
atgagaatccccgtggacgccagcacctcccggcgcttcacacctccgtctacggctctgagccccggcaagatgtccgaggccctccctctgggggcgcccgatgctggagccgcccttgctggcaaactgagatctggggaccggagcatggtcgaagttctcgccgatcaccctggagagctggtgcgcaccgactcccccaactttctttgctctgtgctgcctacacattggagatgtaataagaccctcccgattgctttcaaagtcgtggccctgggcgatgttcccgacgggacactggtgaccgtcatggcgggaaacgatgaaaattacagcgccgagctccggaacgctacagccgctatgaagaatcaggtggcccgctttaacgacctgagattcgttggccggtccggccgcgggaaatcttttacccttacgatcaccgtgttcacaaatcctccccaagtcgcgacctatcacagagccattaagatcacagtggatggacctcgggaaccccgcagacatcggcagaagctggacgatcagaccaaaccgggcagcctctcctttagcgagcgcctgtctgagcttgaacagctgagacggacggctatgagagtgtcccctcaccatcccgcccctacacccaacccccgcgctagcctcaatcactctaccgccttcaaccctcaaccgcagtcccagatgcaggacacacggcaaattcagcccagccctccctggtcctacgatcagtcttatcagtacctggggagcatcgcctcccctagcgtccaccccgctaccccgatctctcctgggagagcgtccggcatgaccacactgagcgccgagctctctagccgcctgtccacggctcccgaccttaccgccttttctgaccctcggcaattccccgccctgcctagcatttccgatcccagaatgcattatccgggggcttttacatacagccctacccccgttacatctggaatcggcattggcatgtccgccatggggagcgcgacccgctatcacacgtacctgccccctccgtaccccggatcttcccaggctcagggcgggcctttccaagccagctccccctcttatcatctctactatggagccagcgctggctcctaccagttttctatggtcgggggagaacggagccctcccagaatccttcctccctgcacaaatgcctccaccggcagcgctctgctcaacccgtctctgcctaatcagtccgacgtggtggaggccgagggccgccaccggaacagccccaccaatatgggaggagcgtcttgttccagacaggcccgccgggatcctggcccctgggctagaacaccgagctgggggcggggacgccctaccgacagaatttctctgtga

SEQ ID NO: 698 - RNA, 1407 nt, synthetic construct
  misc_feature 1..1407: note = Homo sapiens__Q01196-10__RUNX1 CDS opt5
  source 1..1407: mol_type = other RNA
atgcccgccgctcctagaggcccggcccagggggaggcggctgcccggacccgcagcagagacgcctccacatctcggcgcttcacgccccctagcaccgctctgtcccccggaaagatgtctgaagccctccctctgggcgctcccgatgccggggcggcccttgctggaaaactgagaagcggcgaccggtccatggtggaggtcctcgccgatcaccctggggaactggttcgcacagactctccgaactttctttgcagcgtgctgcccacccattggagatgtaataagacactccctatcgctttcaaagtggtcgccctgggagatgtgcccgacggcaccctggttacagtgatggcgggcaacgatgagaattactccgccgaactccggaacgctaccgccgctatgaagaatcaagtcgcccgctttaacgacctgagattcgtggggcggagcggacgcggcaaatcttttacgcttaccattacagttttcaccaatcctccccaggtggccacatatcacagagctatcaagattaccgtcgatgggccgcgggagcctcgcagacatcggcagaagctggacgatcagacgaaacccggatccctcagcttttctgagagactgtccgaacttgagcaactgcgccggacagcgatgagagtgagccctcaccatcccgcccccacccctaacccgcgcgcttctctcaatcactccacagccttcaacccccagcctcagagccagatgcaagacacccggcagatccagccctcccctccctggtcttacgatcagagctatcaatacctgggctccattgccagcccgtctgtgcaccctgctacccccatctcccctgggagagccagcggaatgacaacgctgtctgcggaactcagctcccgcctgtctaccgctcccgaccttacagcctttagcgaccctcggcagttccccgccctgccgtccatcagcgatcctagaatgcattatcccggcgcttttacctactctcccacacctgtcacctccggcattgggatcggaatgagcgccatgggctctgctacgcgctatcacacatacctcccgcccccttaccccgggtccagccaggcccaaggaggccctttccaggcgtcctctcccagctatcatctgtactatggggcctccgctggatcttaccagtttagcatggttggcggcgagcggtcccctccccgcattcttccgccttgcaccaatgccagcaccgggtctgctctgctcaacccctccctgcctaatcagagcgacgtggtggaggccgaaggatctcactccaacagccccacaaatatggcgccgtctgccagactggaggaagctgtctggcggccttattga

SEQ ID NO: 699 - RNA, 1371 nt, synthetic construct
  misc_feature 1..1371: note = Homo sapiens__Q01196-9__RUNX1 CDS opt5
  source 1..1371: mol_type = other RNA
atgaaccccagcagagacgtgcacgatgcctccacctctcggcgcttcacacctccgagcacggctctgtcccccggcaagatgtctgaggccctccctctgggggcgcccgacgctggagccgcccttgctggcaaactgagaagcggggatcggtccatggtcgaagttctcgccgaccatcctggagagctggtgcgcaccgattctcccaattttctttgcagcgtgctgcctacacactggagatgtaacaagaccctcccgatcgctttcaaagtcgtggccctgggcgacgttcccgatgggacactggtgaccgtcatggcgggaaatgacgaaaactactccgccgagctccggaatgctacagccgctatgaagaaccaggtggcccgctttaatgatctgagattcgttggccggagcggccgcgggaaatcttttacccttacgattaccgtgttcacaaaccctccccaagtcgcgacctatcatagagccatcaagattacagtggacggacctcgggaaccccgcagacaccggcagaagctggatgaccagaccaaaccgggctccctcagcttttctgagcgcctgtccgagcttgaacagctgagacggacggctatgagagtgagccctcatcaccccgcccctacacccaatccccgcgcttctctcaaccactccaccgccttcaatcctcaaccgcagagccagatgcaggatacacggcaaatccagccctcccctccctggtcttacgaccagagctatcagtacctggggtccattgccagcccttctgtccatcccgctaccccgatctcccctgggagagcgagcggcatgaccacactgtctgccgagctcagctcccgcctgtctacggctcccgaccttaccgcctttagcgatcctcggcaattccccgccctgccttccatcagcgaccccagaatgcactatccgggggcttttacatactctcctacccccgttacatccggaattggcatcggcatgagcgccatggggtctgcgacccgctatcatacgtacctgccccctccgtaccccggatccagccaggctcagggcgggcctttccaagcctcctctcccagctatcacctctactatggagcctccgctggctcttaccagtttagcatggtgggaggagaacggtcccctccccgcattcttcctccctgcacaaacgccagcaccggctctgctctgctcaatccgtccctgcctaaccagagcgatgtggtcgaggccgagggctctcactccaatagccccaccaacatggcgccttctgccagactggaagaggctgtgtggcggccctattga

SEQ ID NO: 700 - RNA, 1362 nt, synthetic construct
  misc_feature 1..1362: note = Homo sapiens__AAA51720.1__RUNX1 CDS opt5
  source 1..1362: mol_type = other RNA
atgagaatccccgtggacgccagcacctcccggcgcttcacacctccgtctacggctctgagccccggcaagatgtccgaggccctccctctgggggcgcccgatgctggagccgcccttgctggcaaactgagatctggggaccggagcatggtcgaagttctcgccgatcaccctggagagctggtgcgcaccgactcccccaactttctttgctctgtgctgcctacacattggagatgtaataagaccctcccgattgctttcaaagtcgtggccctgggcgatgttcccgacgggacactggtgaccgtcatggcgggaaacgatgaaaattacagcgccgagctccggaacgctacagccgctatgaagaatcaggtggcccgctttaacgacctgagattcgttggccggtccggccgcgggaaatcttttacccttacgatcaccgtgttcacaaatcctccccaagtcgcgacctatcacagagccattaagatcacagtggatggacctcgggaaccccgcagacatcggcagaagctggacgatcagaccaaaccgggcagcctctcctttagcgagcgcctgtctgagcttgaacagctgagacggacggctatgagagtgtcccctcaccatcccgcccctacacccaacccccgcgctagcctcaatcactctaccgccttcaaccctcaaccgcagtcccagatgcaggacacacggcaaattcagcccagccctccctggtcctacgatcagtcttatcagtacctggggagcatcgcctcccctagcgtccaccccgctaccccgatctctcctgggagagcgtccggcatgaccacactgagcgccgagctctctagccgcctgtccacggctcccgaccttaccgccttttctgaccctcggcaattccccgccctgcctagcatttccgatcccagaatgcattatccgggggcttttacatacagccctacccccgttacatctggaatcggcattggcatgtccgccatggggagcgcgacccgctatcacacgtacctgccccctccgtaccccggatcttcccaggctcagggcgggcctttccaagccagctccccctcttatcatctctactatggagccagcgctggctcctaccagttttctatggtgggaggagaacggagccctcccagaatccttcctccctgcacaaatgcctccaccggcttcgctctgctcaacccgagcctgcctaatcagtctgacgtggtcgaggccgagggctcccacagcaactctcccaccaatatggcgccttccgcccgcctggaagaggctgtgtggcggccctattga

SEQ ID NO: 701 - RNA, 1170 nt, synthetic construct
  misc_feature 1..1170: note = Homo sapiens__H9KVB1__RUNX1 CDS opt5
  source 1..1170: mol_type = other RNA
atgagaatccccgtggacgccagcacctcccggcgcttcacacctccgtctacggctctgagccccggcaagatgtccgaggccctccctctgggggcgcccgatgctggagccgcccttgctggcaaactgagatctggggaccggagcatggtcgaagttctcgccgatcaccctggagagctggtgcgcaccgactcccccaactttctttgctctgtgctgcctacacattggagatgtaataagaccctcccgattgctttcaaagtcgtggccctgggcgatgttcccgacgggacactggtgaccgtcatggcgggaaacgatgaaaattacagcgccgagctccggaacgctacagccgctatgaagaatcaggtggcccgctttaacgacctgagattcgttggccggtccggccgcgggaaatcttttacccttacgatcaccgtgttcacaaatcctccccaagtcgcgacctatcacagagccattaagatcacagtggatggacctcgggaaccccgcaacaccagacagattcagccgagccctccctggtcctacgaccagagctatcaatacctgggctctatcgcttcccctagcgtgcatcccgccacgcccatctctcctgggcgggcttccggaatgacaaccctcagcgccgagctgtcctctcgccttagcacagccccggatctgaccgctttttccgaccccagacagttccctgcgctccccagcatttctgatcctcggatgcactatcccggcgcctttacctactccccgacacctgtcacgagcgggatcggaattggcatgtctgctatgggcagcgccaccagatatcatacatacctgccccctccctaccctgggtcctctcaggcccagggaggccccttccaagctagctccccgagctatcacctgtactatggggcctctgcgggatcctaccagtttagcatggttggcggggagcgctctcctccccggatcctgcccccttgcaccaatgcttccacaggaagcgccctccttaacccgtccctgcccaatcagtctgacgtggtggaagccgagggcagccactccaactctcctaccaatatggctcccagcgccagactcgaagaggctgtctggcgcccttattga

SEQ ID NO: 702 - RNA, 1047 nt, synthetic construct
  misc_feature 1..1047: note = Homo sapiens__Q01196-11__RUNX1 CDS opt5
  source 1..1047: mol_type = other RNA
atggccggcaacgacgagaattacagcgctgaactgagaaacgccaccgcggctatgaagaatcaggtggcccggttcaacgatctccgctttgtcgggagatccggacggggcaaatctttcacactgacgatcaccgtttttacaaatccccctcaagtggccacctatcaccgcgctattaagatcacagtggacgggccgagagagccccggcgccatagacagaaacttgatgaccagaccaagcctggaagcctgtccttctctgaacggctcagcgagctggaacagcttcgcagaacagccatgcgggtctctccccaccatcctgctcccacccctaacccgcgcgcctccctgaatcacagcacggcgtttaacccccaacctcagtcccagatgcaggataccagacaaattcagcccagccctccctggtcttacgaccagtcctatcagtacctcggcagcatcgcctctccgtccgtgcatcctgctacacccattagccctgggcgggcctctggaatgaccacactgtccgctgagctgagctcccgcctctctaccgcccccgatctgacggcgttcagcgaccccagacaatttcctgcccttccgtccatcagcgatccccggatgcactatcctggcgctttcacatactctcccacccctgttacatccggcatcgggattggaatgagcgccatgggctctgctaccagatatcacacctacctgcccccgccttaccccgggagctcccaggcccagggaggcccttttcaagcctctagcccctcctatcatctctactatggggctagcgcgggatcttaccagttctccatggtgggcggcgagcgcagccctccccggatcctgccgccttgcacaaatgcctctacggggtccgcccttctgaaccccagcctccccaatcagtccgacgtcgtggaagctgagggatctcacagcaactcccctaccaatatggccccgtctgctagactggaagaggccgtttggcgcccctattga

SEQ ID NO: 703 - RNA, 774 nt, synthetic construct
  misc_feature 1..774: note = Homo sapiens__Q01196-4__RUNX1 CDS opt5
  source 1..774: mol_type = other RNA
atgagaatccccgtggacgccagcacctcccggcgcttcacacctccgtctacggctctgagccccggcaagatgtccgaggccctccctctgggggcgcccgatgctggagccgcccttgctggcaaactgagatctggggaccggagcatggtcgaagttctcgccgatcaccctggagagctggtgcgcaccgactcccccaactttctttgctctgtgctgcctacacattggagatgtaataagaccctcccgattgctttcaaagtcgtggccctgggcgatgttcccgacgggacactggtgaccgtcatggcgggaaacgatgaaaattacagcgccgagctccggaacgctacagccgctatgaagaatcaggtggcccgctttaacgacctgagattcgttggccggtccggccgcgggaaatcttttacccttacgatcaccgtgttcacaaatcctccccaagtcgcgacctatcacagagccattaagatcacagtggatggacctcgggaaccccgcagacatcggcagaagctggacgatcagaccaaaccgggcagcctctcctttagcgagcgcctgtctgagcttgaacagctgagacggacggctatgagagtgtcccctcaccatcccgcccctacacccaacccccgcgctagcctcaatcactctaccgccttcaaccctcaaccgcagtcccagatgcaggacacacggcaaattcagcccagccctccctggtcctacgatcagtcttga

SEQ ID NO: 704 - RNA, 771 nt, synthetic construct
  misc_feature 1..771: note = Homo sapiens__A8MZI9__RUNX1 CDS opt5
  source 1..771: mol_type = other RNA
atgcccgccgctcctagaggcccggcccagggggaggcggctgcccggacccgcagcagagacgcctccacatctcggcgcttcacgccccctagcaccgctctgtcccccggaaagatgtctgaagccctccctctgggcgctcccgatgccggggcggcccttgctggaaaactgagaagcggcgaccggtccatggtggaggtcctcgccgatcaccctggggaactggttcgcacagactctccgaactttctttgcagcgtgctgcccacccattggagatgtaataagacactccctatcgctttcaaagtggtcgccctgggagatgtgcccgacggcaccctggttacagtgatggcgggcaacgatgagaattactccgccgaactccggaacgctaccgccgctatgaagaatcaagtcgcccgctttaacgacctgagattcgtggggcggagcggacgcggcaaatcttttacgcttaccattacagttttcaccaatcctccccaggtggccacatatcacagagctatcaagattaccgtcgatgggccgcgggagcctcgcagacatcggcagaagctggacgatcagacgaaacccggatccctcagcttttctgagagactgtccgaacttgagcaactgcgccggacagcgatgagagtgagccctcaccatcccgcccccacccctaacccgcgcgcttctctcaatcactccacagccttcaacccccagcctcagagccagatgcaatga

SEQ ID NO: 705 - RNA, 753 nt, synthetic construct
  misc_feature 1..753: note = Homo sapiens__Q01196-3__RUNX1 CDS opt5
  source 1..753: mol_type = other RNA
atgagaatccccgtggacgccagcacctcccggcgcttcacacctccgtctacggctctgagccccggcaagatgtccgaggccctccctctgggggcgcccgatgctggagccgcccttgctggcaaactgagatctggggaccggagcatggtcgaagttctcgccgatcaccctggagagctggtgcgcaccgactcccccaactttctttgctctgtgctgcctacacattggagatgtaataagaccctcccgattgctttcaaagtcgtggccctgggcgatgttcccgacgggacactggtgaccgtcatggcgggaaacgatgaaaattacagcgccgagctccggaacgctacagccgctatgaagaatcaggtggcccgctttaacgacctgagattcgttggccggtccggccgcgggaaatcttttacccttacgatcaccgtgttcacaaatcctccccaagtcgcgacctatcacagagccattaagatcacagtggatggacctcgggaaccccgcagacatcggcagaagctggacgatcagaccaaaccgggcagcctctcctttagcgagcgcctgtctgagcttgaacagctgagacggacggctatgagagtgtcccctcaccatcccgcccctacacccaacccccgcgctagcctcaatcactctaccgccttcaaccctcaaccgcagtcccagatgcaggaggaagacacagccccctggcggtgctga

SEQ ID NO: 706 - RNA, 729 nt, synthetic construct
  misc_feature 1..729: note = Homo sapiens__Q01196-7__RUNX1 CDS opt5
  source 1..729: mol_type = other RNA
atgagaatccccgtggacgccagcacctcccggcgcttcacacctccgtctacggctctgagccccggcaagatgtccgaggccctccctctgggggcgcccgatgctggagccgcccttgctggcaaactgagatctggggaccggagcatggtcgaagttctcgccgatcaccctggagagctggtgcgcaccgactcccccaactttctttgctctgtgctgcctacacattggagatgtaataagaccctcccgattgctttcaaagtcgtggccctgggcgatgttcccgacgggacactggtgaccgtcatggcgggaaacgatgaaaattacagcgccgagctccggaacgctacagccgctatgaagaatcaggtggcccgctttaacgacctgagattcgttgatggccctcgggaaccccgcagacaccggcaaaaacttgacgatcagaccaagcctggctccctgagcttttctgagcgcctctccgagctggaacagcttagacggacggcgatgcgcgtgagcccccatcacccggcccctacccccaatcctagagcttctctgaaccattccacagccttcaatccccagccccaaagccagatgcaggacacccggcagatccaaccttctccgccctggtcctatgatcagagctaccagtatctcgggtccattgcttctcctagcgtccaccccgccacacctatctga

SEQ ID NO: 707 - RNA, 675 nt, synthetic construct
  misc_feature 1..675: note = Homo sapiens__Q01196-5__RUNX1 CDS opt5
  source 1..675: mol_type = other RNA
atgagaatccccgtggacgccagcacctcccggcgcttcacacctccgtctacggctctgagccccggcaagatgtccgaggccctccctctgggggcgcccgatgctggagccgcccttgctggcaaactgagatctggggaccggagcatggtcgaagttctcgccgatcaccctggagagctggtgcgcaccgactcccccaactttctttgctctgtgctgcctacacattggagatgtaataagaccctcccgattgctttcaaagtcgtggccctgggcgatgttcccgacgggacactggtgaccgtcatggcgggaaacgatgaaaattacagcgccgagctccggaacgctacagccgctatgaagaatcaggtggcccgctttaacgacctgagattcgttggccggtccggccgcgggaaatcttttacccttacgatcaccgtgttcacaaatcctccccaagtcgcgacctatcacagagccattaagatcacagtggatggacctcgggaaccccgcagcaagtgcattcatctgggcctcgtgcacccgcctgggtggtacaccctgcaggctggaatccttagagaccatgtctccgatagcctgggctctacgtttccccctgggggatggcaggcccccgttaaacccaagtcctga

SEQ ID NO: 708 - RNA, 567 nt, synthetic construct
  misc_feature 1..567: note = Homo sapiens__Q01196-6__RUNX1 CDS opt5
  source 1..567: mol_type = other RNA
atgagaatccccgtggacgccagcacctcccggcgcttcacacctccgtctacggctctgagccccggcaagatgtccgaggccctccctctgggggcgcccgatgctggagccgcccttgctggcaaactgagatctggggaccggagcatggtcgaagttctcgccgatcaccctggagagctggtgcgcaccgactcccccaactttctttgctctgtgctgcctacacattggagatgtaataagaccctcccgattgctttcaaagtcgtggccctgggcgatgttcccgacgggacactggtgaccgtcatggcgggaaacgatgaaaattacagcgccgagctccggaacgctacagccgctatgaagaatcaggtggcccgctttaacgacctgagattcgttggccggtccggccgcgggaaatcttttacccttacgatcaccgtgttcacaaatcctccccaagtcgcgacctatcacagagccattaagatcacagtggatggacctcgggaaccccgcaacagcctgacctggccgagataccctcatatttga

SEQ ID NO: 709 - RNA, 384 nt, synthetic construct
  misc_feature 1..384: note = Homo sapiens__Q01196-1__RUNX1(1-128) CDS opt5
  source 1..384: mol_type = other RNA
atgagaatccccgtggacgccagcacctcccggcgcttcacacctccgtctacggctctgagccccggcaagatgtccgaggccctccctctgggggcgcccgatgctggagccgcccttgctggcaaactgagatctggggaccggagcatggtcgaagttctcgccgatcaccctggagagctggtgcgcaccgactcccccaactttctttgctctgtgctgcctacacattggagatgtaataagaccctcccgattgctttcaaagtcgtggccctgggcgatgttcccgacgggacactggtgaccgtcatggcgggaaacgatgaaaattacagcgccgagctccggaacgctacagccgctatgaagaatcaggtg

SEQ ID NO: 710 - RNA, 531 nt, synthetic construct
  misc_feature 1..531: note = Homo sapiens__Q01196-1__RUNX1(1-177) CDS opt5
  source 1..531: mol_type = other RNA
atgagaatccccgtggacgccagcaccagccggcgcttcacacctccgtctacggctctgagccccggcaagatgtccgaggccctccctctgggggcgcccgatgctggagccgcccttgctggcaaactgagatctggggaccggagcatggtcgaagttctcgccgatcaccctggagagctggtgcgcaccgactcccccaactttctttgctctgtgctgcctacacattggagatgtaataagaccctcccgattgctttcaaagtcgtggccctgggcgatgttcccgacgggacactggtgaccgtcatggcgggaaacgatgaaaattacagcgccgagctccggaacgctacagccgctatgaagaatcaggtggcccgctttaacgacctgagattcgttggccggtccggccgcgggaaatcctttacccttacgatcaccgtgttcacaaatcctccccaagtcgcgacctatcacagagccattaagatcacagtggatggacctcgggaaccccgc

SEQ ID NO: 711 - RNA, 723 nt, synthetic construct
  misc_feature 1..723: note = Homo sapiens__Q01196-1__RUNX1(1-241) CDS opt5
  source 1..723: mol_type = other RNA
atgagaatccccgtggacgccagcacctcccggcgcttcacacctccgtctacggctctgagccccggcaagatgtccgaggccctccctctgggggcgcccgatgctggagccgcccttgctggcaaactgagatctggggaccggagcatggtcgaagttctcgccgatcaccctggagagctggtgcgcaccgactcccccaactttctttgctctgtgctgcctacacattggagatgtaataagaccctcccgattgctttcaaagtcgtggccctgggcgatgttcccgacgggacactggtgaccgtcatggcgggaaacgatgaaaattacagcgccgagctccggaacgctacagccgctatgaagaatcaggtggcccgctttaacgacctgagattcgttggccggtccggccgcgggaaatcttttacccttacgatcaccgtgttcacaaatcctccccaagtcgcgacctatcacagagccattaagatcacagtggatggacctcgggaaccccgcagacatcggcagaagctggacgatcagaccaaaccgggcagcctctcctttagcgagcgcctgtctgagcttgaacagctgagacggacggctatgagagtgtcccctcaccatcccgcccctacacccaacccccgcgctagcctcaatcactctaccgccttcaaccctcaaccgcagtcccagatgcag

SEQ ID NO: 712 - RNA, 1815 nt, synthetic construct
  misc_feature 1..1815: note = Homo sapiens__Q06455-1__RUNX1T1a CDS opt5
  source 1..1815: mol_type = other RNA
atgatcagcgtgaagagaaacacctggcgggccctgtccctcgtcattggcgactgccgcaaaaaggggaatttcgagtactgtcaggatagaacagaaaaacactctacgatgcccgacagccctgttgatgtgaagacccaatcccggctgacaccgcccaccatgcctccccctcccacaacccagggagctcctcgcacatctagctttaccccgacgacccttacaaacggcacctcccattctcccacagccctgaatggggcgcctagccctcccaacggattctccaatggccccagctctagcagcagctccagcctcgctaaccagcagctgccgcctgcctgcggggccagacaactttctaaactgaagcggtttctcaccacgctgcagcagttcggaaatgacatctcccccgagattggcgaacgcgtgagaacactggtcctcggcctggtgaacagcacccttacaatcgaggaatttcactccaagctgcaggaggctaccaatttccctctccggccctttgttattcccttcctgaaagccaaccttcctctgctccaacgcgagctgctgcattgtgctagactcgccaagcagaatccggcgcagtatctggcccagcacgaacaacttctgctcgatgcttctaccacaagccccgtggactccagcgagctgcttctggatgtcaacgaaaatgggaaacggcgcacgcctgacagaaccaaggagaacggatttgatcgggagcccctccattctgaacacccttccaaacgcccctgcacaatcagcccgggccagagatactctcctaataacgggctgagctatcagcccaacggactgcctcaccccacccctcccccgcctcaacattaccggctcgacgatatggccatcgctcaccattatagagactcctaccgccacccctctcaccgggatctgagagaccgcaatcggcccatgggccttcatgggacaagacaggaggaaatgattgaccaccgcctgaccgatcgggagtgggccgaagagtggaagcatctcgaccatctgcttaactgtatcatggatatggtggagaagacgagacgcagcctgacagttctccggagatgccaggaagcggaccgcgaggaactgaattattggattcggagatactccgatgccgaggacctgaaaaagggaggcggctcctcttccagccactctcggcagcaatcccctgtgaacccggatcccgtcgctctcgacgcccaccgcgagttcctgcacagacctgctagcgggtacgtgcccgaagagatctggaaaaaggccgaagaggccgtgaatgaagtcaaacggcaggctatgaccgagcttcagaaggcggtttccgaagccgagagaaaagctcatgatatgattaccacagagcgcgccaagatggaacggaccgtggccgaggctaagagacaggccgcggaagacgctctggccgtgatcaaccaacaggaggattctagcgagtcctgttggaattgcggacgcaaagcctctgaaacatgtagcggctgcaacacggctagatattgtgggtccttttgccagcacaaggactgggagaaacatcaccacatttgcggacagaccctccaagcccagcagcagggcgacacccctgctgtctcttcttccgtgacccccaatagcggggccggatctcctatggatacacccccggcggccacccctcggtccacgacccccggcacacctagcaccatcgaaacaacaccccgctga

SEQ ID NO: 713 - RNA, 1992 nt, synthetic construct
  misc_feature 1..1992: note = Homo sapiens__A0A0A0MSU1__RUNX1T1a CDS opt5
  source 1..1992: mol_type = other RNA
atgtgccaccccgacaaggccttcaccagcgataaactgcagtgtgtgtttaacgagtacaaggctgccgtctgggttcctccgagaccccggcctctctcccgcgcgcccctgcctgaagctggcggggagaatcttcatctgaaaatctctagagtgcggaagcgcaacctccccttcgtggtctggggagaagaggaagccagcacacctggcctggacgccatttcccaccatctttgctatccggatagaacgcaccgggaccgcaccgagaaacattctacaatgcccgatagccctgtggacgttaagacccaatccagactgacaccccctaccatgcccccgcctcccacaacccagggggctcctcggacgtctagctttacccccacaaccctcacaaatggaacctcccacagccccacggccctgaacggcgctccttctccgcccaatgggttctccaacggacctagcagctccagcagctccagcctggccaatcagcagcttccccctgcgtgtggcgcccgccaactgtccaagctcaaaagatttctgacaaccctccagcagttcggcaacgatatctctcccgagattggggaacgggtgcgcacactggtccttggactggtgaatagcaccctcaccatcgaggaatttcactccaagctgcaggaggctacaaacttcccgctgagaccttttgttattcccttcctcaaagccaatctgcctcttctgcaacgggagctcctgcattgcgctcgccttgccaagcagaaccccgcgcagtacctggcccagcacgaacaactcctgctggacgctagcacgacctctcctgtggattccagcgagctcctgcttgacgtcaatgaaaacggcaaaagacggacacccgatagaaccaaggagaatgggtttgaccgcgaaccgctgcattctgagcaccctagcaagcggccctgtacaatctcccccggacagagatattctcctaacaacggcctcagctaccagccgaatgggctgccccaccctacaccccctccccctcaacattatcgccttgatgacatggccatcgctcaccattaccgggactcctatagacaccccagccatcgcgatctgcgggacagaaaccgcccgatgggactccacggcacgcggcaggaggaaatgattgatcacagactgacagaccgcgagtgggccgaagagtggaaacatctggatcacctcctgaattgcatcatggacatggtggaaaagacccggagatctcttaccgtgctgcggcgctgtcaggaggccgatagagaggaactcaactactggattcggagatactccgacgctgaggatctgaaaaagggcgggggatcttcttccagccattcccgccagcaatctcctgtcaatcccgaccctgttgcgctggatgcccaccgggagttccttcacagacccgctagcggctatgtgccggaagaaatctggaaaaaggccgaggaggccgtgaacgaagtcaaacgccaggctatgacagagctccagaaggccgtgtccgaagcggagagaaaggctcatgacatgattaccacagagcgggccaaaatggaacgcacggttgccgaggctaagagacaggccgctgaagacgccctggcggtgatcaatcaacaggaggattctagcgaatcctgctggaactgtgggcggaaagccagcgagacctgctctggatgtaatacagctcgctactgcggctccttttgccagcacaaggactgggagaaacatcaccatatttgtgggcagaccctgcaagcccagcagcagggagatacccctgctgtctcttcttccgtgacccccaacagcggcgccggctctcctatggacacgcctcccgcggccacccccagaagcacaaccccggggacaccctccaccatcgaaacgacacctcggtga

SEQ ID NO: 714 - RNA, 1848 nt, synthetic construct
  misc_feature 1..1848: note = Homo sapiens__Q06455-3__RUNX1T1a CDS opt5
  source 1..1848: mol_type = other RNA
atgtgccaccccgacaaggccttcaccagcgataaactgcagtgtgtgtttaacgagtacaaggctgccgtctgggttcctccgagaccccggcctctctcccgcgcgcccctgcctgaagacagaacagagaaacattctacgatgcccgatagccctgtggacgtgaagacccaatcccggcttacaccgcccaccatgcctccccctcccacaacccagggcgctccgcgcacatctagcttcacccctacgaccctgacaaatgggacctcccactctcccacagccctcaacggagcccctagccctcccaatggcttttccaacgggcccagcagctcctcttcttccagcctggctaatcagcagcttccgcccgcctgcggagctagacaactgtctaaactcaagcggttcctgaccacgctgcagcagtttggcaacgatatctcccctgaaattggggagcgcgtcagaacactcgtgctgggacttgttaatagcaccctgacaatcgaagagttccattccaagctccaggaggccaccaactttcccctgcggcctttcgtgattccctttcttaaagcgaatctgccgctcctgcaacgcgaactgctccactgtgccagactggctaagcagaaccctgcccagtatcttgctcagcatgagcaactgctcctggacgcctctaccacaagccccgtcgattccagcgaacttctgctcgacgtgaatgagaacggcaaacggcgcacgcctgatagaaccaaggagaatggcttcgaccgggaacccctgcactctgagcacccttccaaacgcccctgcacaatcagcccggggcagagatactctcctaacaatggactgagctatcagcccaacggcctcccccatcctaccccgccccctccccaacactaccggctggatgacatggcgattgcccatcactatagagattcctaccgccacccttctcatcgggaccttagagaccgcaaccggcccatggggctgcacggaacaagacaggaagagatgatcgatcatcgcctcaccgaccgggaatgggctgaggagtggaagcacctggatcatcttctgaattgtatcatggacatggttgaaaagacgagacgcagcctcacagtgctgcggagatgccaggaggccgatcgcgaggaactgaactattggattcggagatactccgacgctgaagatctcaaaaagggcgggggatcttcttccagccactctcggcagcaatcccctgtcaatcccgacccggtggccctggatgcccaccgcgagtttcttcatagacctgctagcggctacgtgcccgaggaaatctggaaaaaggcggaggaagccgtcaacgaggttaaacggcaggctatgaccgaactgcagaaggccgtgtccgaggccgagagaaaagctcacgacatgattaccacagaacgcgccaagatggagcggaccgtggcggaagctaagagacaggccgccgaggatgctctcgccgtcatcaatcaacaggaggactctagcgaatcctgttggaactgcggccgcaaagctagcgagacatgtagcgggtgcaatacggccagatattgtggatccttctgccagcataaggactgggaaaaacaccaccatatttgcggccagaccctgcaagcgcagcagcagggggatacccctgccgtgtctagctccgttacacccaacagcggagctggctctccgatggacacacctcccgccgctacccctcggtccacgacccccgggacacccagcaccatcgagacaacccctcgctga

SEQ ID NO: 715 - RNA, 1755 nt, synthetic construct
  misc_feature 1..1755: note = Homo sapiens__A0A087WWT6__RUNX1T1a CDS opt5
  source 1..1755: mol_type = other RNA
atggtgggcctgagcgggcccgtccagtacagaaccgagaagcactccacaatgcctgactctccggttgatgtgaaaacgcaaagccggctcacaccccctaccatgccccctccccctaccacacagggagccccgcgcacctcctctttcacacccaccacgctgaccaacggcacaagccattcccctaccgctcttaatggggccccctctcctcccaacggatttagcaatggcccgtccagcagctcctcttcttccctggcgaaccagcagctccctcccgcttgcggggccagacaactgagcaaacttaagcggttcctgacaaccctccagcagtttggaaatgacatctctcctgaaattggcgagcgcgtgagaacgctggtcctgggcctcgtgaactccacactgaccatcgaagagttccacagcaaacttcaggaagccacaaattttcccctgcggcccttcgttattccttttctcaaggctaacctgccgcttctgcaacgcgagctcctgcattgtgccagactggctaagcagaatcccgcccagtatctcgcgcagcacgagcaactgcttctggatgcctccaccacctctcctgtggacagctccgaactcctgcttgatgtcaacgagaatgggaagcggcgcacacccgacagaacgaaagaaaacggattcgatcgggagcctctgcatagcgagcacccctctaagcgcccgtgcaccatctcccctggccagagatacagccccaataacgggctctcttatcagcctaatggactgccccaccctacacccccgcctccccaacattaccggctggacgatatggctattgcccaccattatcgcgacagctacagacacccctcccaccgggatctcagagaccgcaaccggcctatgggcctgcatgggaccagacaggaagagatgatcgatcaccgccttacagaccgggaatgggctgaggaatggaaacatctggaccacctcctgaactgtatcatggatatggtggagaagaccagacgctctcttacggttctgcggagatgccaggaggccgaccgcgaggaactcaattattggattcggagatacagcgatgcggaagacctgaaaaagggaggcggctcctctagctcccatagccgccagcaatctccggtgaaccccgatcctgtcgccctggacgctcaccgggagtttctccacagacccgcctccgggtacgtgcctgaagagatctggaagaaagctgaggaagccgtgaatgaggtcaagcggcaggccatgacagaactgcagaaagctgttagcgaggcggaacgcaaggcccatgatatgattaccaccgagagagctaaaatggagcggacagtggccgaagccaagagacaggctgccgaggacgcgcttgctgtgatcaaccaacaggaagattcctctgagagctgttggaattgcggacgcaaagcctccgagacctgttctggctgcaacacagcccggtattgtgggagcttctgccagcacaaggactgggaaaagcatcaccacatttgtggacagacgctgcaagctcagcagcagggcgatacccccgccgtctccagctctgtgacacctaattccggggctggaagccccatggacaccccgcctgccgcgacacccagatctaccacgcctggcaccccctccacaatcgagaccacaccgcgctga

SEQ ID NO: 716 - RNA, 1734 nt, synthetic construct
  misc_feature 1..1734: note = Homo sapiens__Q06455-2__RUNX1T1a CDS opt5
  source 1..1734: mol_type = other RNA
atgcccgacagaaccgagaagcacagcacaatgcctgattccccggtggacgtcaaaacgcagtctcggctgacaccccctaccatgccccctccccctaccacacaaggcgccccgcgcaccagctccttcacacccaccacgctcaccaacgggacatctcatagccctaccgctctgaatggagccccctcccctcccaacggcttttctaatgggccgagctcctctagctccagctctcttgcgaaccagcagctgcctcccgcttgcggagccagacagctctccaagctgaaacggttccttacaaccctgcaacagtttggcaatgatatcagccctgaaattggggagcgcgttagaacgctcgtgctgggactggtgaactctacactcaccatcgaagagttccactccaagctgcaggaagccacaaattttccccttcggcccttcgtcattccttttctgaaagctaacctcccgctgcttcagcgcgagctgctccattgtgccagactggctaagcaaaatcccgcccagtacctggcgcagcacgagcagctcctgcttgacgccagcaccacctcccctgtggattctagcgaactgctcctggacgttaacgagaatggcaagcggcgcacacccgatagaacgaaagaaaacggcttcgaccgggagcctcttcattccgagcaccccagcaagcgcccgtgcaccatctctcctgggcaaagatattcccccaataacggactgagctaccagcctaatggcctcccccaccctacacccccgcctccccagcattatcggctggatgacatggctattgcccaccattaccgcgattcttatagacaccccagccaccgggacctgagagatcgcaaccggcctatggggctccatggaaccagacaagaagagatgatcgaccaccgcctgacagaccgggaatgggctgaggaatggaaacatcttgatcatctgctcaactgtatcatggacatggtggagaagaccagacgctccctgacggtccttcggagatgccaggaggccgatcgcgaggaactgaattactggattcggagatattctgacgcggaagatctcaaaaagggcgggggaagctccagctctcactcccgccagcagagcccggtgaaccccgaccctgttgccctggatgctcaccgggagtttctgcacagacccgcctctggctacgtgcctgaagagatctggaagaaagctgaggaagccgtcaatgaggtgaagcggcaagccatgacagaactccagaaagctgtgtccgaggcggaacgcaaggcccatgacatgattaccaccgagagagctaaaatggagcggacagtcgccgaagccaagagacaggctgccgaggatgcgctggctgttatcaaccagcaagaagacagctccgagtcttgttggaattgcggccgcaaagccagcgagacctgttccgggtgcaacacagcccggtactgtggatctttctgccagcacaaggattgggaaaagcatcaccacatttgtggccagacgcttcaggctcaacagcagggggacacccccgccgtgagctccagcgtgacacctaattctggagctggctcccccatggacaccccgcctgccgcgacacccagaagcaccacgcctgggaccccctctacaatcgagaccacaccgcgctga

SEQ ID NO: 717 - RNA, 1704 nt, synthetic construct
  misc_feature 1..1704: note = Homo sapiens__Q06455-4__RUNX1T1a CDS opt5
  source 1..1704: mol_type = other RNA
atgcccgacagccctgtggatgtcaagacccagtccagactgacaccgcccacgatgcctccccctcccaccacacaaggcgcccctcggacctctagcttcacaccgaccacactcaccaacgggacgtcccactctcccaccgctctgaatggagccccttctccccctaacggcttttccaatgggccctctagctccagcagctccagccttgcgaaccagcagctgccgcctgcttgcggagcccgccagctctctaaactgaagagattccttacaaccctgcaacagtttggcaatgacatctcccccgagattggggaacgggttcgcacactcgtgctgggactggtgaacagcaccctcacgatcgaggagttccattctaaactgcaggaagccacaaattttcctcttagacccttcgtcattccctttctgaaggctaacctccctctgcttcagcgggaactgctccactgtgcccgcctggctaaacaaaatccggcccagtacctggcgcagcatgagcagctcctgcttgatgcctccaccacaagccccgtggactcctctgagctgctcctggatgttaacgaaaatggcaagagacggacccctgaccgcaccaaggagaacggcttcgatagagaaccccttcacagcgagcatccttccaaacggccctgcacaatcagcccggggcaacgctattctcctaataacggactgtcctaccagcccaatggcctccctcaccccacgcctcccccgcctcagcactatagactggacgatatggctattgcccatcactaccgggacagctatcgccatccctctcacagagatctgcgggacagaaaccgccccatggggctccacggaacccggcaagaggaaatgatcgatcatagactgacagaccgcgagtgggctgaagagtggaagcaccttgaccatctgctcaactgtatcatggatatggtggagaaaacccggagaagcctgacagtccttcgccggtgccaggaagccgacagagaggaactgaattactggattcgccggtattccgatgcggaggacctcaagaaaggcgggggatctagctccagccactctagacagcagtcccctgtgaacccggatcccgttgccctggacgctcatcgcgaatttctgcaccggcctgccagcggctacgtgcccgaggaaatctggaagaaggctgaggaggccgtcaatgaagtgaaaagacaagccatgaccgagctccagaaggctgtgtctgaagcggagcggaaagcccacgatatgattacgacagaacgcgctaagatggagagaaccgtcgccgaggccaaacggcaggctgccgaagacgcgctggctgttatcaaccagcaagaggattccagcgaatcctgttggaattgcggcagaaaggcctctgagacctgtagcgggtgcaacacagcccgctactgtggatccttctgccagcataaagactgggagaagcaccatcacatttgtggccagacccttcaggctcaacagcagggggatacccctgccgtgtctagctccgtgacgcccaatagcggagctggctctcctatggacacacccccggccgcgacacctcggtccaccacacccgggacccctagcacgatcgaaaccacacccagatga

SEQ ID NO: 718 - RNA, 1284 nt, synthetic construct
  misc_feature 1..1284: note = Homo sapiens__Q06455-5__RUNX1T1a CDS opt5
  source 1..1284: mol_type = other RNA
atgatcagcgtgaagagaaacacctggcgggccctgtccctcgtcattggcgactgccgcaaaaaggggaatttcgagtactgtcaggatagaacagaaaaacactctacgatgcccgacagccctgttgatgtgaagacccaatcccggctgacaccgcccaccatgcctccccctcccacaacccagggagctcctcgcacatctagctttaccccgacgacccttacaaacggcacctcccattctcccacagccctgaatggggcgccttctccccctaacggattctccaatggccccagcagctcctcttcttccagcctcgctaaccagcagctgccgcctgcctgcggggccagacaactttctaaactgaagcggtttctcaccacgctgcagcagttcggaaatgacatctcccccgagattggcgaacgcgtgagaacactggtcctcggcctggtgaacagcacccttacaatcgaggaatttcactccaagctgcaggaggctaccaatttccctctccggccctttgttattcccttcctgaaagccaaccttcctctgctccaacgcgagctgctgcattgtgctagactcgccaagcagaatccggcgcagtatctggcccagcacgaacaacttctgctcgatgcttctaccacaagccccgtggactccagcgagctgcttctggatgtcaacgaaaatgggaaacggcgcacgcctgacagaaccaaggagaacggatttgatcgggagcccctccattctgaacacccttccaaacgcccctgcacaatcagcccgggccagagatactctcctaataacgggctgagctatcagcccaacggactgcctcaccccacccctcccccgcctcaacattaccggctcgacgatatggccatcgctcaccattatagagactcctaccgccacccctctcaccgggatctgagagaccgcaatcggcccatgggccttcatgggacaagacaggaggaaatgattgaccaccgcctgaccgatcgggagtgggccgaagagtggaagcatctcgaccatctgcttaactgtatcatggatatggtggagaagacgagacgcagcctgacagttctccggagatgccaggaagcggaccgcgaggaactgaattattggattcggagatactccgatgccgaggacctgaaaaagggaggcggcagcagctccagccactctcggcagcaatcccctgtgaacccggatcccgtcgctctcgggtga

SEQ ID NO: 719 - RNA, 1203 nt, synthetic construct
  misc_feature 1..1203: note = Homo sapiens__Q06455-6__RUNX1T1a CDS opt5
  source 1..1203: mol_type = other RNA
atgcccgacagaaccgagaagcacagcacaatgcctgattccccggtggacgtcaaaacgcagtctcggctgacaccccctaccatgccccctccccctaccacacaaggcgccccgcgcaccagctccttcacacccaccacgctcaccaacgggacatctcatagccctaccgctctgaatggagccccctcccctcccaacggcttttctaatgggccgagctcctctagctccagctctcttgcgaaccagcagctgcctcccgcttgcggagccagacagctctccaagctgaaacggttccttacaaccctgcaacagtttggcaatgatatcagccctgaaattggggagcgcgttagaacgctcgtgctgggactggtgaactctacactcaccatcgaagagttccactccaagctgcaggaagccacaaattttccccttcggcccttcgtcattccttttctgaaagctaacctcccgctgcttcagcgcgagctgctccattgtgccagactggctaagcaaaatcccgcccagtacctggcgcagcacgagcagctcctgcttgacgccagcaccacctcccctgtggattctagcgaactgctcctggacgttaacgagaatggcaagcggcgcacacccgatagaacgaaagaaaacggcttcgaccgggagcctcttcattccgagcaccccagcaagcgcccgtgcaccatctctcctgggcaaagatattcccccaataacggactgagctaccagcctaatggcctcccccaccctacacccccgcctccccagcattatcggctggatgacatggctattgcccaccattaccgcgattcttatagacaccccagccaccgggacctgagagatcgcaaccggcctatggggctccatggaaccagacaagaagagatgatcgaccaccgcctgacagaccgggaatgggctgaggaatggaaacatcttgatcatctgctcaactgtatcatggacatggtggagaagaccagacgctccctgacggtccttcggagatgccaggaggccgatcgcgaggaactgaattactggattcggagatattctgacgcggaagatctcaaaaagggcgggggaagctccagctctcactcccgccagcagagcccggtgaaccccgaccctgttgccctgggctga

SEQ ID NO: 720 - RNA, 1722 nt, synthetic construct
  misc_feature 1..1722: note = Homo sapiens__Q06455-1__RUNX1T1a(31-604) CDS opt5
  source 1..1722: mol_type = other RNA
agaaccgagaagcacagcacaatgcccgactcccctgtggatgtcaaaacgcagtctcggctgaccccgcccacaatgcctccccctcccaccacacaaggcgcccctcgcaccagctccttcacaccgaccacgctcaccaacgggacatctcatagccccaccgctctgaatggagccccttctccccctaacggcttttctaatgggcccagctccagctcctccagctctcttgcgaaccagcagctgccgcctgcttgcggagccagacagctctccaagctgaaacggttccttacaaccctgcaacagtttggcaatgacatcagccccgaaattggggagcgcgttagaacgctcgtgctgggactggtgaactctacactcaccatcgaagagttccactccaagctgcaggaagccacaaattttcctcttcggcccttcgtcattccctttctgaaagctaacctccctctgcttcagcgcgagctgctccattgtgccagactggctaagcaaaatccggcccagtacctggcgcagcacgagcagctcctgcttgatgccagcaccacctcccccgtggactctagcgaactgctcctggatgttaacgagaatggcaagcggcgcacacctgacagaacgaaagaaaacggcttcgatcgggagccccttcattccgagcaccctagcaagcgcccctgcaccatctctccggggcaaagatattcccctaataacggactgagctaccagcccaatggcctccctcaccccacacctcccccgcctcagcattatcggctggacgatatggctattgcccaccattaccgcgactcttatagacaccccagccaccgggatctgagagaccgcaaccggcccatggggctccatggaaccagacaagaagagatgatcgatcaccgcctgacagaccgggaatgggctgaggaatggaaacatcttgaccatctgctcaactgtatcatggatatggtggagaagaccagacgctccctgacggtccttcggagatgccaggaggccgaccgcgaggaactgaattactggattcggagatattctgatgcggaagacctcaaaaagggcgggggaagctccagctctcactcccgccagcagagccctgtgaacccggatcccgttgccctggacgctcaccgggagtttctgcacagacctgcctctggctacgtgcccgaagagatctggaagaaagctgaggaagccgtcaatgaggtgaagcggcaagccatgacagaactccagaaagctgtgtccgaggcggaacgcaaggcccatgatatgattaccaccgagagagctaaaatggagcggacagtcgccgaagccaagagacaggctgccgaggacgcgctggctgttatcaaccagcaagaagatagctccgagtcttgttggaattgcggccgcaaagccagcgagacctgttccgggtgcaacacagcccggtactgtggatctttctgccagcacaaggactgggaaaagcatcaccacatttgtggccagacgcttcaggctcaacagcagggggatacccctgccgtgagctccagcgtgacacccaattctggagctggctcccctatggacacacccccggccgcgacccctagaagcaccacgcccgggaccccttctacaatcgagaccacaccccgc

SEQ ID NO: 721 - RNA, 1815 nt, synthetic construct
  misc_feature 1..1815: note = Homo sapiens__O43439-1__RUNX1T1b CDS opt5
  source 1..1815: mol_type = other RNA
atggccaaggagagcggcatctccctgaaagaaattcaggtgctcgctagacaatggaaggtcgggcccgagaaacgggttcctgccatgccgggatctcccgtggaagtgaagatccagagccgctcctctcctcccaccatgcctcccctgcctccgattaaccccggcgggcctagacccgtcagcttcacacctacggcgctttccaatggaatcaaccactctcccccgaccctgaatggcgctcctagccctcctcagcggttttccaacgggcccgccagctctacatccagcgccctcaccaatcagcaactgcccgctacatgcggagcccgccagctttctaaactgaagagattcctcaccacactgcagcagtttggcaacgacatttcccctgagatcggcgaaaaggtgcggaccctggttctcgctctggtgaatagcacggtcaccatcgaggagttccattgtaaacttcaagaagccacaaactttccgctgcgccccttcgtgattccttttctcaaggcgaatctgccccttctgcagagagagctcctgcactgcgcccgggctgccaaacagaccccttctcagtacctggctcaacatgaacacctcctgcttaacacatccatcgccagccccgcggattcctctgagctgctcatggaggttcatgggaatggaaagcgcccgagccctgaaagacgggaggaaaactccttcgaccgcgataccattgcccccgagcctcccgctaaaagagtgtgtacgatcagccctgctccccggcactctccggccctgacagtccctcttatgaatcccggcgggcagtttcaccccacccctccgcccctgcagcattatacactcgaagacattgccacctcccacctgtaccgcgagcctaacaagatgctggagcatagagaagtgcgggatagacaccacagcctcggactgaatggcgggtatcaagacgagcttgtggatcatcgcctgaccgaacgggagtgggccgacgaatggaagcacctcgatcatgctctgaactgcatcatggagatggtcgagaaaacaagacgctctatggcggttcttcggagatgtcaggaaagcgaccgcgaggaactgaactactggaagcggagatataatgagaacacggaactccgcaaaaccggaacagagctggtgtcccggcagcactctcccggcagcgccgattccctgagcaatgactctcagagagagttcaactcccgccctggcaccgggtacgtgcccgtcgaattttggaagaaaacagaggaagctgtgaataaggttaaaattcaagccatgagcgaggtgcagaaggccgtcgctgaggccgaacagaaggcgttcgaggtgatcgctaccgaacgggccagaatggagcagacgatcgccgatgttaaacggcaagctgccgaagacgcttttctcgtgattaacgagcaggaggaatctacagagaattgctggaactgtggacgcaaggcctccgaaacctgcagcggctgtaatatcgcgagatattgcgggtccttctgtcagcataaagactgggagcggcaccacagactgtgcggacagaaccttcatggccaatctcctcacgggcagggacgccccctgctcccggtcggccggggcagctccgccagatctgctgattgcagcgtgccttcccccgccctggacaagaccagcgctacaacctctcgctccagcacacccgcctctgtcacggcgattgataccaatgggctgtga

SEQ ID NO: 722 - RNA, 1845 nt, synthetic construct
  misc_feature 1..1845: note = Homo sapiens__O43439-4__RUNX1T1b CDS opt5
  source 1..1845: mol_type = other RNA
atgggcttccaccatgtggggcaggccagactggagctcctgaccagcggagaccttcccgctctggcctcccaacgggcgggcatcacagtcgggcctgaaaagcgcgttccggctatgcccggatctcctgtggaggtgaaaattcagagcagatcctctccccctacgatgccccctctcccgcccatcaaccctggcgggccccggcctgtcagctttacccccacagccctgtccaatggaattaaccactctccgcctacccttaatggcgcccccagccctccccagcgcttctccaacggccccgctagctctacatccagcgccctgaccaatcagcaactccctgctacatgcggggccagacagctgtctaagctgaaacggtttctcaccacgctgcagcagttcggaaacgatatctccccggaaattggcgagaaggtgcgcacccttgttctggcgctcgtgaatagcacagtcaccatcgaagagtttcattgtaaactgcaagaggccacaaacttcccccttagaccttttgtgatccccttcctgaaggctaatctccctctgctgcagcgggaactcctgcactgcgcccgcgctgccaagcagaccccctctcagtaccttgcgcaacatgagcatctgctcctgaacacgtccattgccagcccggctgactcctctgaacttctgatggaggttcacgggaatggaaaaagacctagccccgagcggcgcgaagagaactcctttgatagagacacaatcgcccctgaaccccctgctaagcgggtgtgtaccattagccccgccccgcgccactctcctgccctcacagtccccctgatgaatcccggcgggcagttccaccctaccccgccccctctgcagcattataccctcgaggatatcgctacatcccacctgtacagagaacccaacaaaatgcttgagcaccgggaggtgagagaccgccatcacagcctgggactcaatggcggctatcaagatgaactggtggaccatcggcttacggagagagaatgggcggatgagtggaagcacctggaccatgccctcaactgcattatggaaatggtcgagaaaacccgccggtctatggctgttctgagacgctgtcaggagagcgatcgggaggaactgaactactggaagagacgctataatgaaaacacagagctccggaagaccgggacagaactggtgtccagacagcactctcctggaagcgccgactcccttagcaatgattctcagcgcgagtttaactcccggcccggcaccgggtacgtgcctgtcgagttctggaaaaagacggaagaggccgtgaataaagttaagatccaagctatgagcgaagtgcagaaagccgtcgcggaggctgagcagaaggcctttgaagtgattgccacagagagagctcggatggaacagaccatcgccgacgttaaacgccaagctgccgaggacgcgttcctggtgatcaacgaacaggaggagtctaccgaaaattgctggaactgtggaagaaaggcctccgagacatgcagcggctgtaatattgctcggtattgcgggtccttctgtcagcacaaggattgggaaagacatcaccgcctctgcggacagaacctgcatggccaatctccccacggccaggggcggccgctgcttcctgtcggaagaggcagctccgcccgctctgctgactgcagcgtgccctcccctgccctcgataaaaccagcgcgacaacgtctagatccagcacccccgcctctgtcacagctatcgacaccaatgggctgtga

SEQ ID NO: 723 - RNA, 1788 nt, synthetic construct
  misc_feature 1..1788: note = Homo sapiens__O43439-5__RUNX1T1b CDS opt5
  source 1..1788: mol_type = other RNA
atggtgggcgtccccggggccgctgccttccagctgggacctgagaagagagttccggcgatgcccggcagccctgtggaagtgaaaatccaatcccggtcttctccccctaccatgccccctctcccgcccattaaccctgggggaccccgccctgtctcctttacacccacggctctgtctaatggcatcaaccacagcccgcctacccttaatggggccccctcccctccccagagattctctaacggacccgccagctccacaagctctgctctgaccaatcagcagctccctgccacatgcggcgctcggcaactgtccaaacttaaacgctttctgaccacactccagcagttcggcaacgacattagcccggagatcggggaaaaggtgagaaccctggttctggccctcgtgaatagcacggtcaccattgaggaatttcattgtaaactgcaggaggcgacaaacttcccccttcggccttttgtgatccccttcctgaaggccaatctccctctgcttcaacgcgagctgctccactgcgctagagccgctaagcagaccccctcccagtacctggcccagcatgaacatctgctcctgaacacaagcatcgcgtctccggccgattccagcgagcttctgatggaagttcacggaaatggcaaacggccttcccccgagcgcagagaggaaaactcttttgaccgggataccattgctcctgagccccctgccaagcgcgtgtgtacgatcagccccgctccgagacactcccctgccctcacagtccccctgatgaatcccgggggacaattccaccctaccccgccccctcttcagcattatacactggaagacattgccaccagccacctctaccgggagcccaacaaaatgctggaacatcgcgaggtgagagatcggcaccactctctgggcctcaatgggggatatcaggacgagctggtggatcatagacttaccgaacgcgagtgggctgacgaatggaagcacctggatcatgcgctcaactgcatcatggagatggtcgaaaagacacggagatccatggccgttctgcgccggtgtcaagagagcgacagagaggaacttaactactggaagcgccggtataatgagaacacggaactgagaaagaccggcacagagctcgtgtctcgccagcacagccctggctccgctgattctctgagcaatgactcccagcgggaatttaacagcagacccgggaccggatacgtgcctgtcgagttctggaaaaagacagaggaagccgtgaataaagttaagattcaggccatgtctgaggtgcaaaaagctgtcgccgaagcggagcagaaggcttttgaggtgatcgccaccgaacgcgcccggatggagcagacgattgctgatgttaaaagacaggccgctgaagacgccttcctggtgatcaacgagcaagaagagtccacagagaattgctggaactgtggccggaaggcgagcgaaacctgctctgggtgtaatatcgcccgctattgcggatccttctgtcagcataaggactgggagagacaccaccggctctgcggccagaacctgcatgggcagagcccccacggacaaggcagaccgcttctgcctgtcggccgcgggtcctctgctcggagcgccgattgctccgtgccctctcctgctctcgacaaaaccagcgccacaacctccagaagctctacacccgcgtccgtcacggccattgataccaatggactgtga

SEQ ID NO: 724 - RNA, 1728 nt, synthetic construct
  misc_feature 1..1728: note = Homo sapiens__O43439-2__RUNX1T1b CDS opt5
  source 1..1728: mol_type = other RNA
atgcccggcagccctgtggaggtcaagatccagtccagatctagcccgcccaccatgcctcccctgcctcccattaaccctgggggaccgcggcccgtttccttcacacctacggccctctctaatggcatcaaccacagcccgcctaccctgaatggggctccctccccgcctcaacgcttttctaacggacccgccagctccacaagctctgcgcttaccaatcagcagctgcctgctacatgcggcgccagacagctctccaaactgaagcggttccttaccacactgcaacagtttgggaacgacattagccccgaaatcggagagaaagtgcgcaccctcgtgctggccctggtcaattctacggtgaccattgaagagttccattgtaagctccaggaagctacaaactttcccctgagacctttcgttatcccgtttcttaaagccaatctgcccctcctgcagcgggagcttctgcactgcgctcgcgccgcgaagcaaaccccttcccagtacctcgcccagcatgagcatctgctgctcaacacaagcatcgcttctcccgccgattccagcgaactgcttatggaggtgcacggcaatggcaagagaccttcccccgaacggcgcgaggagaactctttcgacagagataccattgctccggaacctcccgccaaacgggtctgtacgatcagccctgcgccccgccactcccctgccctgacagtgcccctcatgaatcccgggggacagtttcaccctacccctccccctctgcaacattatacacttgaggacattgctaccagccacctgtacagagaaccgaacaagatgctcgagcatcgggaagttcgcgatagacaccactctctgggcctgaatgggggatatcaggacgagctcgtggatcatcggctgaccgagagagaatgggccgacgagtggaaacaccttgatcatgctctgaactgcatcatggaaatggtcgagaagacacgccggtccatggccgtgctcagacgctgtcaggaaagcgaccgggaggagctgaactactggaaaagacgctataatgaaaacacggagcttcggaagaccggcacagaactggtgtctagacaacacagccccgggtccgccgattctctcagcaatgactcccagcgcgagttcaacagccggcctggaaccggctacgtccccgttgaattttggaagaaaacagaggaggctgtgaataaggtgaaaattcaggcgatgtctgaagtccagaaggccgtggctgaggccgaacaaaaagccttcgaggttatcgctaccgagagagcccgcatggaacagacgattgcggatgtgaagcggcaggctgccgaggacgcctttctggtcatcaacgaacaggaggaatccacagagaattgctggaactgtggcagaaaagctagcgagacctgctctgggtgtaatatcgcccggtattgcggatccttctgtcaacataaggactgggaacgccaccacagactgtgcggccagaacctccatgggcagagccctcacggacagggccggcccctgcttcctgtggggagaggatcctctgctcgcagcgccgattgctccgttccctctccggcgctggacaagaccagcgccacaacctcccggagctctacacccgcttccgtgacggccattgataccaatggcctctga

SEQ ID NO: 725 - RNA, 48 nt, synthetic construct
  misc_feature 1..48: note = Homo sapiens____RUNX1T1b(short) CDS opt5
  source 1..48: mol_type = other RNA
gaggtgggcttctgccacgtcgcccaggttgggctgaagctcctggga

SEQ ID NO: 726 - RNA, 1749 nt, synthetic construct
  misc_feature 1..1749: note = Homo sapiens__O43439-1__RUNX1T1b(22-604) CDS opt5
  source 1..1749: mol_type = other RNA
ggccccgagaagagagtgcctgccatgccggggagccccgtcgaagttaaaatccagtcccggtctagccctcccaccatgcctcccctgcctccgattaaccccggaggccctcgccccgtgtccttcacacctacggctctctctaatgggatcaaccactctcccccgaccctgaatggagccccttcccctcctcaaagattttctaacggccccgcgagctccacaagctctgctcttaccaatcagcagctgcccgccacatgcggggcccggcagctctccaagctgaaacgcttccttaccacactgcaacagtttggaaacgacattagccctgagatcggcgaaaaggtgagaaccctcgtcctggctctggtgaatagcacggttaccattgaggagttccattgtaaactccaggaagccacaaactttccgctgcggcccttcgtgatcccttttcttaaggctaatctgcccctcctgcagcgcgagcttctgcactgcgccagagcggccaagcaaaccccttcccagtacctcgctcagcatgaacatctgctgctcaacacaagcatcgcctctcccgctgattccagcgagctgcttatggaagtccacggcaatgggaaacggccgtcccctgagcgcagagaggaaaactctttcgaccgggataccattgcccccgagcctcccgcgaagcgcgtgtgtacgatcagccctgcccccagacactccccggctctgacagttcctctcatgaatcccggaggccagtttcaccccacccctccgcccctgcaacattatacacttgaagacattgccaccagccacctgtaccgggagcctaacaaaatgctcgaacatcgcgaggtgagagatcggcaccactctctggggctgaatggaggctatcaggacgagctcgtcgatcatagactgaccgaacgcgagtgggctgacgaatggaagcaccttgatcatgccctgaactgcatcatggagatggtggagaaaacacggagatccatggccgtgctccgccggtgtcaggaaagcgacagagaggaactgaactactggaagcgccggtataatgagaacacggaacttagaaagaccgggacagagctggtctctcgccaacacagccccggatccgctgattctctcagcaatgactcccagcgggagttcaacagcagacctggcaccggctacgttcccgtggaattttggaaaaagacagaggaagcggtgaataaagtcaagattcaggccatgtctgaggtgcagaaagctgttgccgaagccgagcaaaaggctttcgaggtgatcgccaccgaacgcgcgcggatggagcagacgattgctgatgtcaaaagacaggccgccgaagacgcttttctggtgatcaacgagcaggaagagtccacagagaattgctggaactgtgggcggaaggccagcgaaacctgctctggatgtaatatcgctcgctattgcggctccttctgtcaacataaggactgggagagacaccaccggctgtgcgggcagaacctccatggacagagccctcacggccaggggagacccctgcttccggttggacgcggctcctctgcccggagcgcggattgctccgtgccttctcccgccctggacaaaaccagcgctacaacctccagaagctctacacccgcctccgtcacggctattgataccaatggcctc

SEQ ID NO: 727 - RNA, 1836 nt, synthetic construct
  misc_feature 1..1836: note = Homo sapiens____CBFbeta(1-165)_SMMHC(1527-1972) CDS opt5
  source 1..1836: mol_type = other RNA
atgcccagagtggtccctgaccagcggagcaagttcgagaacgaagagtttttccgcaaactgtccagagaatgcgagatcaagtacaccggctttcgggatcgcccgcacgaagagagacaagcccggttccagaatgcttgtcgcgacgggagatctgagattgcctttgttgcgacaggaacgaacctcagcctgcagttctttcccgcttcctggcagggcgaacaacggcagaccccttctcgcgagtatgtggatcttgaaagagaggccgggaaagtgtacctgaaggcccccatgatcctcaatggagtctgcgtgatttggaaaggctggatcgacctgcagcggcttgatgggatgggatgtctggagttcgacgaggaacgcgctcagcaagaagatgccctcgctcagcaggcctttgaggaagcgagacggcgcacaagagagttcgaggaccgggatagaagccatcgcgaagagatggaagttcacgagctggaaaagtccaagcgggccctggagacccagatggaggaaatgaaaacacaactcgaggaactggaggacgaacttcaggctaccgaggatgccaagctgagactcgaggtgaacatgcaggctctgaaaggccaatttgaacgcgaccttcaggcccgggatgagcagaatgaagagaagagacgccagctgcaacggcagctccatgagtatgaaacagagctggaagacgagagaaaacagcgcgcgctggccgctgccgctaagaagaaactcgaaggcgacctgaaggatcttgagctgcaggccgactctgccattaaagggcgggaggaagctatcaagcaactcagaaaactgcaggcgcagatgaaggatttccagcgcgagcttgaagacgcccgggctagcagagatgagatctttgccaccgccaaagaaaacgagaagaaggctaaatccctggaggccgacctcatgcaactgcaggaagatctggcggctgccgagcgggcccgcaagcaggctgacctcgaaaaagaggaactggccgaggagcttgctagctctctgtccggaagaaatgccctccaggatgaaaagcggagactggaggcgcgcattgcccaacttgaagaggagctggaagaggaacagggcaacatggaggctatgagcgaccgggtcagaaaagccacgcagcaagctgaacagctctctaatgagctggccaccgagcgctccacagcgcagaagaacgaaagcgccagacagcaactggagcggcagaataaggaactccgctctaaactgcacgagatggaaggggctgtgaagtccaaattcaagagcaccatcgccgctcttgaggccaaaattgcccagctggaggaacaggttgagcaagaagctagagagaagcaggcggccacaaagtccctcaaacagaaggataaaaagctgaaagaaatcctgcttcaggtggaggacgagcggaagatggctgaacaatacaaggagcaggccgaaaaaggaaacgcccgcgtcaagcagctcaaaagacaactggaggaggctgaagaggaatctcagcggattaatgccaaccgcagaaagctgcagcgggagctcgacgaagcgaccgagagcaatgaggctatgggccgcgaagtgaacgccctgaaatccaaacttagacgggggaacgagacgagcttcgtgccttctagacgctccggaggccggagagtcatcgaaaatgccgatggcagcgaggaagagacagacacccgcgatgctgactttaacgggacaaaggcctctgagtga

SEQ ID NO: 728 - RNA, 1551 nt, synthetic construct
  misc_feature 1..1551: note = Artificial____CBFbeta(1-165)_SMMHC(1527-1877) CDS opt5
  source 1..1551: mol_type = other RNA
atgcccagagtggtccctgaccagcggagcaagttcgagaacgaagagtttttccgcaaactgtccagagaatgcgagatcaagtacaccggctttcgggatcgcccgcacgaagagagacaagcccggttccagaatgcttgtcgcgacgggagatctgagattgcctttgttgcgacaggaacgaacctcagcctgcagttctttcccgcttcctggcagggcgaacaacggcagaccccttctcgcgagtatgtggatcttgaaagagaggccgggaaagtgtacctgaaggcccccatgatcctcaatggagtctgcgtgatttggaaaggctggatcgacctgcagcggcttgatgggatgggatgtctggagttcgacgaggaacgcgctcagcaagaagatgccctcgctcagcaggcctttgaggaagcgagacggcgcacaagagagttcgaggaccgggatagaagccatcgcgaagagatggaagttcacgagctggaaaagtccaagcgggccctggagacccagatggaggaaatgaaaacacaactcgaggaactggaggacgaacttcaggctaccgaggatgccaagctgagactcgaggtgaacatgcaggctctgaaaggccaatttgaacgcgaccttcaggcccgggatgagcagaatgaagagaagagacgccagctgcaacggcagctccatgagtatgaaacagagctggaagacgagagaaaacagcgcgcgctggccgctgccgctaagaagaaactcgaaggcgacctgaaggatcttgagctgcaggccgactctgccattaaagggcgggaggaagctatcaagcaactcagaaaactgcaggcgcagatgaaggatttccagcgcgagcttgaagacgcccgggctagcagagatgagatctttgccaccgccaaagaaaacgagaagaaggctaaatccctggaggccgacctcatgcaactgcaggaagatctggcggctgccgagcgggcccgcaagcaggctgacctcgaaaaagaggaactggccgaggagcttgctagctctctgtccggaagaaatgccctccaggatgaaaagcggagactggaggcgcgcattgcccaacttgaagaggagctggaagaggaacagggcaacatggaggctatgagcgaccgggtcagaaaagccacgcagcaagctgaacagctctctaatgagctggccaccgagcgctccacagcgcagaagaacgaaagcgccagacagcaactggagcggcagaataaggaactccgctctaaactgcacgagatggaaggggctgtgaagtccaaattcaagagcaccatcgccgctcttgaggccaaaattgcccagctggaggaacaggttgagcaagaagctagagagaagcaggcggccacaaagtccctcaaacagaaggataaaaagctgaaagaaatcctgcttcaggtggaggacgagcggaagatggctgaacaatacaaggagcaggccgaaaaaggaaacgcctga

SEQ ID NO: 729 - RNA, 612 nt, synthetic construct
  misc_feature 1..612: note = Artificial____CBFbeta(1-165)_Linker_Lifeact CDS opt5
  source 1..612: mol_type = other RNA
atgcccagagtggtccctgaccagcggagcaagttcgagaacgaagagtttttccgcaaactgtccagagaatgcgagatcaagtacaccggctttcgggatcgcccgcacgaagagagacaagcccggttccagaatgcttgtcgcgacgggagatctgagattgcctttgttgcgacaggaacgaacctcagcctgcagttctttcccgcttcctggcagggcgaacaacggcagaccccttctcgcgagtatgtggatcttgaaagagaggccgggaaagtgtacctgaaggcccccatgatcctcaatggagtctgcgtgatttggaaaggctggatcgacctgcagcggcttgatgggatgggatgtctggagttcgacgaggaacgcgctcagcaagaagatgccctcgctcagcaggcctttgaggaagcgagacggcgcacaagagagttcgaggaccgggatagaagccatcgcgaagagatggaaggcggctccgggggatctggcgggagcggaggctccgggggaggcggcgttgccgacctgattaagaagtttgagagcatctctaaagaagagggggatcctcccgtggctacctga

SEQ ID NO: 730 - RNA, 579 nt, synthetic construct
  misc_feature 1..579: note = Artificial____CBFbeta(1-165)_HIF1alpha(549-575) CDS opt5
  source 1..579: mol_type = other RNA
atgcccagagtggtccctgaccagcggagcaagttcgagaacgaagagtttttccgcaaactgtccagagaatgcgagatcaagtacaccggctttcgggatcgcccgcacgaagagagacaagcccggttccagaatgcttgtcgcgacgggagatctgagattgcctttgttgcgacaggaacgaacctcagcctgcagttctttcccgcttcctggcagggcgaacaacggcagaccccttctcgcgagtatgtggatcttgaaagagaggccgggaaagtgtacctgaaggcccccatgatcctcaatggagtctgcgtgatttggaaaggctggatcgacctgcagcggcttgatgggatgggatgtctggagttcgacgaggaacgcgctcagcaagaagatgccctcgctcagcaggcctttgaggaagcgagacggcgcacaagagagttcgaggaccgggatagaagccatcgcgaagagatggaacctttttccacccaggacacagatctggacctggagatgctcgccccctatattcctatggatgacgacttccaactgcggtga

SEQ ID NO: 731 - RNA, 624 nt, synthetic construct
  misc_feature 1..624: note Artificial____CBFbeta(1-165)_Linker_HIF1alpha(549-575) CDS opt5
  source 1..624: mol_type = other RNA
atgcccagagtggtccctgaccagcggagcaagttcgagaacgaagagtttttccgcaaactgtccagagaatgcgagatcaagtacaccggctttcgggatcgcccgcacgaagagagacaagcccggttccagaatgcttgtcgcgacgggagatctgagattgcctttgttgcgacaggaacgaacctcagcctgcagttctttcccgcttcctggcagggcgaacaacggcagaccccttctcgcgagtatgtggatcttgaaagagaggccgggaaagtgtacctgaaggcccccatgatcctcaatggagtctgcgtgatttggaaaggctggatcgacctgcagcggcttgatgggatgggatgtctggagttcgacgaggaacgcgctcagcaagaagatgccctcgctcagcaggcctttgaggaagcgagacggcgcacaagagagttcgaggaccgggatagaagccatcgcgaagagatggaaggcggctccgggggatctggcgggagcggaggctccgggggaggcccttttagcacccaggacacagatctggacctggagatgctcgccccctatattcctatggatgacgacttccaactgcggtga

SEQ ID NO: 732 - RNA, 2259 nt, synthetic construct
  misc_feature 1..2259: note = Artificial____RUNX1(1-177)_N_RUNX1T1a(31-604) CDS opt5
  source 1..2259: mol_type = other RNA
atgagaatccccgtggacgccagcacctcccggcgcttcacacctccgtctacggctctgagccccggcaagatgtccgaggccctccctctgggggcgcccgatgctggagccgcccttgctggcaaactgagatctggggaccggagcatggtcgaagttctcgccgatcaccctggagagctggtgcgcaccgactcccccaactttctttgctctgtgctgcctacacattggagatgtaataagaccctcccgattgctttcaaagtcgtggccctgggcgatgttcccgacgggacactggtgaccgtcatggcgggaaacgatgaaaattacagcgccgagctccggaacgctacagccgctatgaagaatcaggtggcccgctttaacgacctgagattcgttggccggtccggccgcgggaaatcttttacccttacgatcaccgtgttcacaaatcctccccaagtcgcgacctatcacagagccattaagatcacagtggatggacctcgggaaccccgcaacagaaccgagaagcattctacgatgccggactcccctgtggatgtcaaaacacagagccggctgacaccccctaccatgccccctcccccgaccacccagggcgctccccgcacatcttcctttacgcctaccacactcaccaatgggacaagccactctcccaccgccctgaacggagctccttccccgcccaatggcttcagcaacgggccttcctctagctccagcagctcccttgccaatcagcaactgccccctgcctgcggagctagacagctcagcaagctgaaacggtttctgacgacactccagcagttcggcaacgacatttctcccgagatcggcgaaagagttcgcaccctggtgcttgggctggtgaatagcaccctcacaatcgaggaatttcattccaagctgcaagaggcgaccaacttccctcttcggccctttgtcattccgttcctgaaagccaacctccctctgctgcagagagagctcctgcactgtgctcgccttgccaagcagaatcccgcccagtacctggctcaacacgaacagctcctgcttgatgcctctacaacgagccccgtggactccagcgagctgctcctggacgttaacgaaaatggaaagcggagaacccctgatcgcacaaaagagaacggcttcgaccgggaaccgctgcattctgagcacccctccaagagaccttgcaccatcagccccgggcagcgctattctcctaataacggactctcctaccaacccaatggcctgcctcatcccacaccgcctccccctcagcactatcggcttgatgacatggcgattgctcaccattacagagatagctatcgccacccctcccatcgggacctgagagatcggaaccgcccgatggggctccacggaaccagacaggaggaaatgatcgaccatcggctgacggatagagagtgggccgaagagtggaaacacctggaccaccttctcaattgtattatggatatggtggaaaagacccgccggtctctgacagtcctgagacgctgccaggaggccgacagagaggaactcaactactggatccggcgctacagcgacgctgaggatctgaaaaagggcggcgggtcctctagctcccatagcagacaacagtctcctgtgaatcccgaccctgttgcccttgatgctcaccgggaatttctgcatcgccccgcctccggatatgtgcccgaggaaatttggaaaaaggcggaggaggccgtcaacgaagtgaagagacaggctatgaccgagctccagaaagccgtcagcgaagctgagcggaaggcccacgacatgatcacaaccgagcgcgcgaaaatggaaagaacggtggccgaggctaagcggcaagccgctgaagatgccctggccgttatcaatcagcaggaggactcttccgaaagctgttggaactgcggccgcaaagctagcgagacatgtagcgggtgcaataccgcgagatactgtggatccttctgccagcacaaggattgggagaagcatcaccatatttgcggccaaacactgcaggcccagcagcaaggggacacccctgctgtgtcttcttccgtcaccccgaacagcggcgccggatcccccatggatacacctcccgccgctacgcctcggtctaccacacccggcacccctagcacaatcgaaaccacgccgagatga

SEQ ID NO: 733 - RNA, 774 nt, synthetic construct
  misc_feature 1..774: note = Artificial____RUNX1(1-241)_RUNX1T1b(short) CDS opt5
  source 1..774: mol_type = other RNA
atgagaatccccgtggacgccagcacctcccggcgcttcacacctccgtctacggctctgagccccggcaagatgtccgaggccctccctctgggggcgcccgatgctggagccgcccttgctggcaaactgagatctggggaccggagcatggtcgaagttctcgccgatcaccctggagagctggtgcgcaccgactcccccaactttctttgctctgtgctgcctacacattggagatgtaataagaccctcccgattgctttcaaagtcgtggccctgggcgatgttcccgacgggacactggtgaccgtcatggcgggaaacgatgaaaattacagcgccgagctccggaacgctacagccgctatgaagaatcaggtggcccgctttaacgacctgagattcgttggccggtccggccgcgggaaatcttttacccttacgatcaccgtgttcacaaatcctccccaagtcgcgacctatcacagagccattaagatcacagtggatggacctcgggaaccccgcagacatcggcagaagctggacgatcagaccaaaccgggcagcctctcctttagcgagcgcctgtctgagcttgaacagctgagacggacggctatgagagtgtcccctcaccatcccgcccctacacccaacccccgcgctagcctcaatcactctaccgccttcaaccctcaaccgcagtcccagatgcaggaggtcgggttttgccacgttgcccaagtgggactgaagctgctcggctga

SEQ ID NO: 734 - RNA, 2478 nt, synthetic construct
  misc_feature 1..2478: note = Artificial____RUNX1(1-241)_V_RUNX1T1b(22-604) CDS opt5
  source 1..2478: mol_type = other RNA
atgagaatccccgtggacgccagcacctcccggcgcttcacacctccgtctacggctctgagccccggcaagatgtccgaggccctccctctgggggcgcccgatgctggagccgcccttgctggcaaactgagatctggggaccggagcatggtcgaagttctcgccgatcaccctggagagctggtgcgcaccgactcccccaactttctttgctctgtgctgcctacacattggagatgtaataagaccctcccgattgctttcaaagtcgtggccctgggcgatgttcccgacgggacactggtgaccgtcatggcgggaaacgatgaaaattacagcgccgagctccggaacgctacagccgctatgaagaatcaggtggcccgctttaacgacctgagattcgttggccggtccggccgcgggaaatcttttacccttacgatcaccgtgttcacaaatcctccccaagtcgcgacctatcacagagccattaagatcacagtggatggacctcgggaaccccgcagacatcggcagaagctggacgatcagaccaaaccgggcagcctctcctttagcgagcgcctgtctgagcttgaacagctgagacggacggctatgagagtgtcccctcaccatcccgcccctacacccaacccccgcgctagcctcaatcactctaccgccttcaaccctcaaccgcagtcccagatgcaggtcgggcccgagaagcgggttcctgccatgcccggaagccctgtggaagtgaaaattcaatccagatctagccctccgacaatgcctcccctgcctcccatcaatcctggcgggccccgcccggtctcctttacccctaccgctctgagcaacggaatcaatcactctcctcccacactcaacggcgcgccctccccgccccagcggttcagcaatggccctgcctctagcacgtcctctgctctgaccaaccagcagcttcccgccacatgcggggccagacaactgagcaagctcaaacgctttctgaccacacttcagcagttcggaaacgacatttcccctgagatcggcgagaaggtgcggaccctggttctcgctctggtgaatagcacggtcacaattgaagagtttcattgtaagctgcaagaagccaccaacttccccctcagacctttcgtgatcccctttctgaaagcgaatcttccgctgctccagcgcgagctgcttcactgcgctcgggccgccaagcagaccccttctcagtacctggctcaacatgaacacctcctgctgaacacatccattgccagccccgctgattcttccgagctcctgatggaggttcacgggaatggaaaaagacctagccccgaacgccgggaggaaaactccttcgacagagacaccatcgccccggagcctcccgcgaagcgggtgtgtacaatttctcctgctccccgccatagccccgcccttacggtccctctgatgaatccgggcgggcagtttcaccccacccctccccctctccagcattatacactggaagatatcgccacctcccacctgtacagagagcccaacaaaatgcttgagcatcgggaagtgagagaccgccaccactctctcggactgaatggcggctatcaggatgagctggtcgaccatcggctcacagaaagagagtgggctgatgaatggaagcacctggaccatgcccttaactgcatcatggagatggtggagaaaacccgcagaagcatggcggttctgcggcgctgtcaagaatccgatagagaggaactcaattactggaagcggcgctataacgagaatacggagctgagaaagaccgggacagaactggtgagccggcagcactctcctggatccgccgacagcctttctaacgattcccagcgcgagttcaatagcagaccgggcaccgggtacgtccccgtggaattttggaaaaagacagaggaagctgttaacaaagtgaagattcaggccatgtctgaggtccaaaaagctgtggccgaggccgaacagaaggctttcgaggtgatcgcgaccgaacgggcccgcatggagcagacgattgctgacgttaagagacaggccgccgaagatgcttttctcgtcatcaacgagcaagaggaaagcacagagaattgctggaactgtggacggaaagcctccgaaacctgcagcggctgtaatattgcgagatactgcgggtctttctgccagcacaaggactgggagcgccatcaccggctgtgtggccagaacctgcatggacaatcccctcacggccaggggagacccctcctgcctgtgggacgcggcagctccgctcggtctgccgactgcagcgtgccctccccggcccttgataaaacatctgctaccaccagcagatcctctacacccgccagcgtcacggcgatcgacaccaatgggctgtga

SEQ ID NO: 735 - RNA, 2478 nt, synthetic construct
  misc_feature 1..2478: note = Artificial____RUNX1(1-241)_I_RUNX1T1b(22-604) CDS opt5
  source 1..2478: mol_type = other RNA
atgagaatccccgtggacgccagcacctcccggcgcttcacacctccgtctacggctctgagccccggcaagatgtccgaggccctccctctgggggcgcccgatgctggagccgcccttgctggcaaactgagatctggggaccggagcatggtcgaagttctcgccgatcaccctggagagctggtgcgcaccgactcccccaactttctttgctctgtgctgcctacacattggagatgtaataagaccctcccgattgctttcaaagtcgtggccctgggcgatgttcccgacgggacactggtgaccgtcatggcgggaaacgatgaaaattacagcgccgagctccggaacgctacagccgctatgaagaatcaggtggcccgctttaacgacctgagattcgttggccggtccggccgcgggaaatcttttacccttacgatcaccgtgttcacaaatcctccccaagtcgcgacctatcacagagccattaagatcacagtggatggacctcgggaaccccgcagacatcggcagaagctggacgatcagaccaaaccgggcagcctctcctttagcgagcgcctgtctgagcttgaacagctgagacggacggctatgagagtgtcccctcaccatcccgcccctacacccaacccccgcgctagcctcaatcactctaccgccttcaaccctcaaccgcagtcccagatgcagattgggcccgagaagcgggtccctgccatgcccggaagccctgttgaagtgaaaatccaatccagatctagccctccgacaatgcctcccctgcctcccatcaatcctggcgggccccgcccggtgtcctttacccctaccgctctgagcaacggaattaatcactctcctcccacactcaacggcgcgccctccccgccccagcggttcagcaatggccctgcctctagcacgtcctctgctctgaccaaccagcagcttcccgccacatgcggggccagacaactgagcaagctcaaacgctttctgaccacacttcagcagttcggaaacgacatctcccctgagattggcgagaaggtccggaccctggtgctcgctctggttaatagcacggtgacaatcgaagagtttcattgtaagctgcaagaagccaccaacttccccctcagacctttcgtcattccctttctgaaagcgaatcttccgctgctccagcgcgagctgcttcactgcgctcgggccgccaagcagaccccttctcagtacctggctcaacatgaacacctcctgctgaacacatccatcgccagccccgctgattcttccgagctcctgatggaggtgcacgggaatggaaaaagacctagccccgaacgccgggaggaaaactccttcgacagagacaccattgccccggagcctcccgcgaagcgggtttgtacaatctctcctgctccccgccatagccccgcccttacggtgcctctgatgaatccgggcgggcagtttcaccccacccctccccctctccagcattatacactggaagatatcgccacctcccacctgtacagagagcccaacaaaatgcttgagcatcgggaagtcagagaccgccaccactctctcggactgaatggcggctatcaggatgagctggtggaccatcggctcacagaaagagagtgggctgatgaatggaagcacctggaccatgcccttaactgcattatggagatggtcgagaaaacccgcagaagcatggcggtgctgcggcgctgtcaagaatccgatagagaggaactcaattactggaagcggcgctataacgagaatacggagctgagaaagaccgggacagaactggttagccggcagcactctcctggatccgccgacagcctttctaacgattcccagcgcgagttcaatagcagaccgggcaccgggtacgtgcccgtcgaattttggaaaaagacagaggaagctgtgaacaaagttaagatccaggccatgtctgaggtgcaaaaagctgtcgccgaggccgaacagaaggctttcgaggtgattgcgaccgaacgggcccgcatggagcagacgatcgctgacgtgaagagacaggccgccgaagatgcttttctcgttattaacgagcaagaggaaagcacagagaattgctggaactgtggacggaaagcctccgaaacctgcagcggctgtaatatcgcgagatactgcgggtctttctgccagcacaaggactgggagcgccatcaccggctgtgtggccagaacctgcatggacaatcccctcacggccaggggagacccctcctgcctgtcggacgcggcagctccgctcggtctgccgactgcagcgtgccctccccggcccttgataaaacatctgctaccaccagcagatcctctacacccgccagcgtgacggcgatcgacaccaatgggctgtga

SEQ ID NO: 736 - RNA, 549 nt, synthetic construct
  misc_feature 1..549: note = Homo sapiens__Q13951-1__CBFbeta CDS opt11
  source 1..549: mol_type = other RNA
atgccgcgcgtggtcccggaccagcgctcgaaatttgaaaatgaagagttctttcgcaaactctcgcgcgagtgcgagatcaagtacacgggctttcgagatcgcccgcacgaggaaaggcaagcgcgatttcaaaatgcctgtcgcgatggcaggagcgagatcgcgttcgtggccacgggcacgaacttgagcttgcaatttttcccggcctcgtggcagggcgagcaaaggcaaacgccctcgcgcgagtacgtggacttggaaagggaagcgggcaaggtctacctcaaggccccgatgatactcaatggcgtgtgcgtgatctggaaagggtggatagacttgcaaagactcgatggcatgggctgtctcgagttcgatgaggaacgcgcacaacaggaagatgccttggcccagcaagcgttcgaggaagcgcgcaggcgaacgcgcgagttcgaggacagggacaggagccatcgcgaggaaatggaagtgcgcgtgagccagctcctggcagtgaccgggaagaaaaccacgcgcccgtga

SEQ ID NO: 737 - RNA, 672 nt, synthetic construct
  misc_feature 1..672: note = Homo sapiens__A0A494C0A9__CBFbeta CDS opt11
  source 1..672: mol_type = other RNA
atgccgcgcgtggtcccggaccagcgctcgaaattcgaaaatgaagagttctttcgaaagctatcgcgcgagtgcgagatcaaatacacgggcttccgcgaccgcccacacgaggaaaggcaagcgcgctttcaaaatgcctgccgcgatggccggagcgagatcgcgttcgtagccacgggcacgaacttgagcctgcaattcttcccagcctcgtggcaaggcgaacaaaggcaaacgccctcgcgcgagtacgtggacctggaaagggaagcaggcaaggtctatctcaaggccccgatgatactcaatggcgtatgcgtgatctggaaagggtggatagacttgcaaagactcgatggcatgggctgtctcgagttcgatgaggaacgcgcgcaacaggaagacgccctggcccagcaagcgttcgaggaagcgcgcagacgcacgcgcgagttcgaggacagggacaggagccatcgcgaggaaatggaagtgcgcgtgagccaactattggccgtgaccgagtggaggagcacgcgcaagttctcgagcttctggatacccccgcccaggggctgtttctgtatcgcgctcacgagcagagaaaatagctcgtgctggtgcgtgttctttcgattgatctggagccacctaatgaccgcaagctag

SEQ ID NO: 738 - RNA, 609 nt, synthetic construct
  misc_feature 1..609: note = Homo sapiens__J3KRT0__CBFbeta CDS opt11
  source 1..609: mol_type = other RNA
atgccacgagtagtaccggaccagcgctcgaaatttgaaaatgaagagttctttagaaagctatcgcgcgagtgcgaaataaagtacacgggcttccgcgatcgcccgcacgaggaaaggcaagcgcgatttcaaaatgcctgtagagatggcaggagcgagatcgtgagcaggctcgcacgcggggccaggggctcactcgtggcaaggggccgaggcgggcccgggcgctttcgcacggccgcgagattgctcaggctcccggaattgagcggacgcaggctcacgagctatagcgggttcaagatgaggaaccagatgccgcgagctggcacgcgcggagaaacgctatttctcgggctcgcggccgtggcaagggtcgggcaaaggagcacggcctcaggcgcgcgcacaagagcgagattgaacaagcgcagggccttgttcaggcgcaggcacaggcgccgagtccagggcatatgctctaaacaaaccccgatcaggaaaaagaaatggagctttatccagggcttttgcgggcacaggaaccagagcgtgagcccggtctttagcgggcaactggccgggcgcacggccacgaacacgtga

SEQ ID NO: 739 - RNA, 564 nt, synthetic construct
  misc_feature 1..564: note = Homo sapiens__Q13951-2__CBFbeta CDS opt11
  source 1..564: mol_type = other RNA
atgccgcgcgtggtcccggaccagcgctcgaaatttgaaaatgaagagttctttcgcaagctctcgagagagtgcgagatcaagtacacgggcttccgcgatcgaccgcacgaggaaaggcaagcgcgctttcaaaacgcctgtagagatggcaggagcgagatcgcgttcgtggcaacgggcacgaacttgagcttgcaatttttcccggcctcgtggcagggcgagcaaaggcaaacgccctcacgcgaatacgtggacctggaaagggaagcgggcaaggtctatctaaaggccccgatgatactcaatggcgtatgcgtgatctggaaagggtggatagacttgcaaaggctcgatggcatgggctgtctcgagttcgatgaggaacgcgcgcaacaggaagatgccctggcacagcaagcgttcgaggaagcgcgcaggcgcacgcgcgagttcgaggacagggacaggagccatcgcgaggaaatggaagcgcgcagacaacaggacccgagcccgggctcgaacttgggcgggggcgatgacttgaaattgcgctag

SEQ ID NO: 740 - RNA, 423 nt, synthetic construct
  misc_feature 1..423: note = Homo sapiens__Q13951-1__CBFbeta(1-141) CDS opt11
  source 1..423: mol_type = other RNA
atgccgcgcgtggtcccggaccagcgctcgaaatttgaaaatgaagagttctttcgcaagctctcgcgcgagtgcgagatcaagtacacgggctttcgcgatcgcccgcacgaggaaaggcaagcgcgctttcaaaatgcctgtcgcgatggcaggagcgagatcgcgttcgtggccacgggcacgaacctgagcttgcaatttttcccggcctcgtggcagggcgagcaaaggcaaacgccctcgcgcgagtacgtggacttggaaagggaagcgggcaaggtctatctcaaggccccgatgatactcaatggcgtgtgcgtaatctggaaagggtggatagacttgcaaaggctcgatggcatgggctgtctcgagttcgatgaggaacgcgcgcaacaggaagatgccttggcccagcaa

SEQ ID NO: 741 - RNA, 495 nt, synthetic construct
  misc_feature 1..495: note = Homo sapiens__Q13951-1__CBFbeta(1-165) CDS opt11
  source 1..495: mol_type = other RNA
atgccgcgcgtggtcccggaccagcgctcgaaatttgaaaatgaagagttctttcgcaagctatcgcgcgagtgcgagatcaagtacacgggctttcgcgatcgaccgcacgaggaaaggcaagcgcgctttcaaaatgcctgtcgcgatggcaggagcgagatcgcgttcgtggccacgggcacgaacctgagcttgcaatttttcccggcctcgtggcagggcgagcaaaggcaaacgccctcgcgcgagtacgtagacttggaaagagaagcgggcaaggtatatctcaaggccccgatgatactcaatggcgtgtgcgtgatctggaaagggtggatagacctgcaaaggctagatggcatgggctgtctcgagttcgatgaggaacgcgcgcaacaggaagatgccctggcccagcaagcgttcgaggaagcgcgcaggcgcacgcgcgagttcgaagacagggacaggagccatcgcgaggaaatggaa

SEQ ID NO: 742 - RNA, 5919 nt, synthetic construct
  misc_feature 1..5919: note = Homo sapiens__P35749-1__SMMHC CDS opt11
  source 1..5919: mol_type = other RNA
atggcacaaaaaggccaacttagcgacgacgaaaagtttctattcgtagacaagaacttcattaactcgcccgtggcacaagccgactgggcagcaaaacgccttgtgtgggtcccctcagaaaagcaggggttcgaggccgcatctatcaaagaggagaaaggcgacgaagtagtagtggaacttgtggaaaacggcaagaaggtcacagtcggcaaggacgacattcagaaaatgaatccacccaaattcagcaaagtcgaggacatggccgagctgacgtgtctaaatgaagcctcggttctgcacaacctacgagagaggtattttagtggtctcatatatacatacagtggactattttgcgtggtagtcaacccgtacaaacacctccccatctatagtgagaaaatcgtagacatgtacaaaggcaagaaacgccatgaaatgccgccccatatatacgcaatagccgacaccgcgtaccgcagtatgctccaagacagagaggaccagagcattctctgcacaggcgaaagtggcgcgggcaaaaccgaaaacacaaagaaagtcatacagtacctcgcagtggtcgcctcgagtcataaagggaagaaagacacctcaatcacgggggagctcgagaaacaactcctgcaagcaaaccccattctagaagcgttcggaaatgccaaaaccgtgaaaaacgacaacagttcgagattcggcaagttcataaggatcaacttcgacgtgacggggtacatcgtaggcgctaacatcgaaacatacttgttagagaaaagtcgggccatcaggcaagcgagggacgaaaggacattccacatattctactacatgatagcgggagcaaaggagaaaatgcggagcgacctcttgctcgagggcttcaataactatacgttcttgagcaatggcttcgtaccaatcccggctgcccaggacgacgagatgttccaagaaacggtagaagcgatggcgataatgggtttctcggaagaagaacaactcagcatccttaaggtagtgtccagtgtactacaactaggcaacatagtctttaaaaaggagagaaacacagaccaagccagcatgcctgacaacaccgccgcacagaaggtctgccacctgatgggcataaacgttacggacttcacgcggtcgatactaacgccgcgcataaaagttggaagagacgtagtacaaaaggcacagacaaaggaacaggcagactttgcagtagaggctctggcaaaagcaacatatgagaggctgttcagatggatactcacgagagtgaacaaagccctagataagacgcaccgacaaggagcatccttcctgggcatactcgacatcgcagggttcgaaatctttgaggtaaactcgtttgagcaattgtgtattaattacacgaacgaaaagttacaacagctgtttaaccacacaatgtttatacttgagcaggaggagtaccagcgagagggaatagaatggaattttatcgacttcggactagatctccagccttgcattgagctaatagaacgaccaaacaatccacccggcgtactggcactactagacgaggaatgttggtttcccaaagctacggacaagtccttcgtagagaaactttgcacagaacaagggagccacccaaagttccagaagccaaaacaacttaaagataaaaccgagttcagcatcatacattacgcaggcaaagtggactacaacgcgagcgcatggttgacgaaaaatatggacccgctaaacgacaacgtgacgtcgctcttgaacgcaagcagcgacaaatttgtggcagacctatggaaagatgtggacagaatcgtgggtctggaccagatggccaaaatgactgaaagcagtttgcccagcgcaagcaaaaccaagaaaggcatgttccgaacagtaggacaactttacaaggaacagctcggaaaactgatgacaaccttaagaaacacgacccccaacttcgtacggtgtataatcccaaaccacgagaagagatcaggaaagttagacgcatttctcgtcctggaacaactcagatgcaacggcgtactagaggggatcaggatctgccggcaaggattcccaaatcgcatagtcttccaagagttcagacagaggtacgaaatcttagccgccaacgccataccgaaagggttcatggacggaaagcaggcgtgcatactcatgataaaagcactagaactcgacccaaatctctaccgaataggacaaagcaaaatattcttcagaaccggagtcttagcgcacctagaggaagaacgggatctaaaaataacagacgtcatcatggcctttcaggcaatgtgtcgcggctacctcgcccggaaagccttcgcgaaacgccaacagcagttgaccgcaatgaaagtaatacagagaaactgcgccgcgtatttaaaactccgtaactggcagtggtggagactttttacgaaggtgaaaccgctacttcaggtcaccagacaggaggaggaaatgcaagcaaaggaagacgagctacagaagacaaaggagcgacaacaaaaagcggaaaatgaactcaaggaattagaacagaaacactcacaactcacggaagagaaaaacttgctgcaggaacaactgcaagccgaaacagagctatacgcggaagcagaagaaatgcgagtaagactcgcagcgaagaaacaagagctcgaagaaatactccatgaaatggaagcgaggctggaagaggaggaagaccgagggcaacagttacaggcagaaagaaagaagatggcccagcaaatgctcgacctcgaagaacaactcgaagaggaagaagccgcaaggcaaaaactccaactagagaaagtcactgccgaagcaaaaatcaagaagctggaagacgaaatcctcgtgatggatgatcaaaacaacaaactcagcaaggaaagaaaactcctagaagagagaattagcgaccttaccacaaacctcgcagaggaggaagaaaaggcaaagaacctgacgaagctaaagaataagcacgaaagcatgataagcgaactggaggtcaggctgaagaaagaggagaaaagcagacaagaactagaaaagctgaagagaaagttagaaggcgacgctagcgacttccacgaacaaatagcggaccttcaggcgcaaattgcagaactaaaaatgcaactggcaaagaaagaagaggaactacaggcggcactggcgaggctggatgacgagattgcacagaagaacaacgcactcaagaaaatcagggaactggagggacatatctcagatctacaagaagatctagacagcgagcgagcagctagaaacaaagcagaaaaacagaaaagagacttaggcgaagaacttgaggcactcaagacagagctagaggacaccttggacagcaccgcaacacagcaggagctccgggcaaaaagggaacaagaggtaaccgtcctcaagaaagccctggacgaagagaccaggagccacgaagcccaagtgcaagagatgagacaaaaacacgcgcaggccgtagaggaactaacagagcaattggagcaattcaaaagagcaaaagctaacctggacaaaaacaagcagacactagaaaaagaaaacgcggatctagcgggggagctgagggtgctcggccaagcaaagcaagaagtcgagcacaagaaaaagaaacttgaagcgcaagtgcaggaactccaaagcaaatgcagcgacggcgaacgcgcccgggcggagctaaacgacaaagtacacaaactccaaaacgaagtagaaagcgtgactgggatgttaaacgaagcggaaggcaaagcgattaagctagcgaaagacgtagcctcactctcaagccaactacaggacacacaagaactactgcaagaggagacgcgccaaaaactaaacgtgagcacgaaactacgacagcttgaagaagaacggaacagcctacaagaccaactggacgaagaaatggaggcgaagcaaaaccttgaacgacacataagcaccctaaacatccagctatcggacagtaaaaagaaattgcaagacttcgcaagcaccgtggaggctctggaggaggggaagaaaaggttccaaaaagagatagagaatctaacacaacaatacgaagaaaaggctgccgcctacgacaaacttgaaaagacgaagaaccgcttacagcaagagctggacgacttggtagtagatctagacaaccagagacaactggtatcaaacctggagaagaaacaaagaaagttcgaccaactactagccgaagagaaaaacataagctcaaagtacgctgacgaaagggaccgggccgaggccgaagcacgcgagaaagagactaaggccctcagcctagcgcgggcgctggaagaagcgttagaagcaaaagaagaactggaacgcacgaataaaatgctaaaagccgaaatggaggacctggtatccagcaaggatgatgtcggaaagaacgtacacgaactagagaaaagcaaacgagccctagaaacccagatggaagaaatgaagacacaactggaagaactagaagacgagctccaagcaacggaagacgccaaacttagactagaggtaaacatgcaggctctaaagggccaattcgagagggatctacaagcacgcgacgaacaaaatgaagaaaaacgacgccaactacagcgacaactccacgagtacgaaacagaactagaggacgaacgaaaacaaagagcattagcagcagcagctaagaagaaattagaaggagacctcaaggacctagaactgcaggcagacagcgctataaagggccgcgaggaagctataaaacagctaagaaagctacaggcccagatgaaagacttccagcgagaactggaagacgcccgagctagccgggacgaaatcttcgcgacagcaaaggaaaacgaaaagaaagccaagagcctcgaagcagatttaatgcaactacaggaggacctggccgcagctgaaagagcacgaaaacaagctgacctagaaaaggaggagctagccgaagaacttgcctcgtccctctcgggaaggaacgcgctgcaagacgagaaacgcaggctcgaagcaaggatagcacaactcgaagaagaactggaggaagaacaaggcaatatggaggcgatgagtgacagagtcaggaaggcaacacagcaggcggaacaattaagcaatgaactagcaacagagaggtcaacagcacagaaaaacgaaagcgcgcgccaacagctagaacgacaaaataaagagcttaggagcaaactacacgaaatggagggagcggtaaagtcgaaattcaagtccaccatagccgctctagaggccaagatagcgcagctggaagaacaggtggaacaagaagcaagggaaaaacaggcggcaaccaaatcgctcaaacaaaaagataagaaacttaaagaaatcctgctccaagtagaagacgaaagaaagatggctgaacagtacaaagagcaggcagaaaaagggaacgcccgcgtcaagcaattaaagagacaattggaggaagcggaagaagagtcacagcgtataaatgctaatagaagaaaactacaacgcgaactcgacgaagcgacggagagcaacgaagcgatgggacgggaagtcaacgctctaaagagtaagctccggcgcgggaacgaaaccagcttcgtaccatcgcgaaggagcggaggacgacgcgtcatagaaaacgcggatgggtctgaagaagagacggacacaagagacgcagacttcaacggaaccaaagctagcgagtaa

SEQ ID NO: 743 - RNA, 5940 nt, synthetic construct
  misc_feature 1..5940: note = Homo sapiens__P35749-2__SMMHC CDS opt11
  source 1..5940: mol_type = other RNA
atggcacaaaaagggcaactgtccgacgatgaaaaattcctgttcgtcgacaaaaacttcatcaatagtccagtggcacaagccgactgggcggcaaaacggttagtatgggtcccatctgaaaaacaaggatttgaagcggcgagcataaaagaagaaaaaggagacgaagtcgtagttgaattagtcgaaaacggcaagaaagtaacagtgggcaaagacgatatacagaaaatgaacccacccaaattcagtaaagtagaggacatggcagaactcacatgcctgaacgaagccagcgtgttacacaacttacgggaacgctatttcagtggcttaatctacacatacagcggcctcttctgcgtagtagttaatccgtataaacatctgccgatctactcagagaaaatagtggacatgtacaaagggaagaaacgacacgaaatgccgccacacatatacgcaatagctgacacagcataccgctcgatgttgcaagacagagaggaccaatcgatactgtgcacgggggaaagtggggcaggcaaaacagagaacacaaagaaagtaatccaatacctagcggtggtggcgagtagccacaaaggaaagaaagacacgtcgatcacgcaagggccctcattcgcctacggagagctggagaaacagttgctacaggcaaacccgatcctagaggcctttggcaatgcgaaaacggtgaaaaatgacaacagcagtaggttcggcaaattcatcagaatcaactttgacgtaaccgggtacatagtaggagcaaatattgagacttacttattagagaaatcacgagcaatccgccaagcgagggacgaacggacattccacatcttctactatatgatagcgggggccaaagaaaagatgagaagcgacctgctactagaaggatttaataactacaccttccttagcaacgggtttgtaccaatccccgcagcgcaagacgacgaaatgttccaagaaaccgtggaagctatggctatcatggggttcagcgaagaggaacagttatctatactgaaggtcgtaagcagcgtgttacaactaggcaacatagtcttcaagaaagaaaggaatacggaccaggccagtatgcccgacaatactgcagctcaaaaggtatgtcatctgatggggatcaacgttacagattttacaagaagcatcctaaccccacgcatcaaggtcggacgcgatgtggtacaaaaagcccagactaaagaacaagccgacttcgcagttgaagccctagcaaaagccacttacgagaggctattccggtggatccttacacgagtgaacaaagccctagataagacacacagacagggcgcatcctttttgggaatattggacatagctggcttcgaaatcttcgaagtgaacagtttcgagcaactatgcataaactacaccaatgaaaaactacaacaactgttcaaccacacaatgttcatattggaacaagaggagtatcaacgtgaaggcatcgaatggaacttcatcgacttcggcctagacctccagccatgtatcgaactcatagaaagacccaacaatccacccggggtgctggccctactcgacgaagaatgctggttcccgaaggcgacggacaaatcatttgtcgagaaactgtgcacggaacaaggaagccacccaaagttccaaaagccgaaacaactgaaggacaagaccgagttcagtatcatacactacgcggggaaggtcgattacaacgcaagcgcgtggctgaccaaaaacatggaccccctcaacgacaacgtcacgtctcttctaaacgcaagtagtgataagtttgtagcagatctgtggaaggacgtcgacaggatagtgggcctcgaccaaatggcaaaaatgacagagagcagcctaccctccgcatcaaaaacgaaaaagggtatgtttcgaacagtcgggcaactgtacaaagagcagctcgggaaactaatgacgacgctacgaaacacaacccccaacttcgtgaggtgcatcatccccaaccacgaaaagaggagcggaaaactagacgctttcctggtcctcgaacaactcagatgcaacggcgtactcgaaggtataagaatctgccgacaaggcttcccaaaccgtatagtcttccaagagttcagacagaggtacgaaatactcgcggcaaacgccataccaaagggcttcatggacggcaagcaggcatgcatcctaatgataaaggcactggagctggaccccaacctgtacaggatcgggcaaagcaaaatattcttcaggacgggcgtgctggcgcacttagaggaagaaagggacctcaaaataacggacgtaataatggcgttccaggcaatgtgcaggggctacctggcacgaaaggcctttgcgaagagacaacaacaactaactgcgatgaaggtgatccagcgaaactgtgccgcttatctaaagttacgtaactggcagtggtggcgcctgttcacaaaagttaagccactactacaagtcacgcgacaagaagaagagatgcaggcaaaagaggacgaacttcagaagaccaaagagcgccagcaaaaagcagaaaacgaacttaaagagcttgagcagaaacatagccagctcacggaagagaagaacctactccaggagcaactccaggccgagacagagctatacgctgaggcggaagaaatgcgggtgagactagccgcgaagaaacaggagctagaagagatccttcacgaaatggaagcgcgactggaagaggaagaagaccgtggacagcaactccaggcagagagaaagaaaatggcacagcaaatgctggaccttgaagaacaactagaagaagaagaggcggccagacaaaaactccaactcgaaaaagtgaccgcagaggcaaaaatcaagaaacttgaggacgaaatcctagtcatggatgaccaaaacaacaaattgagcaaagaacgaaaactcctcgaggagcgaataagcgatctaaccaccaatctggctgaagaagaagaaaaggcgaaaaacctaaccaaactgaaaaacaaacacgaaagcatgatcagcgagctagaggtgaggctaaagaaagaggaaaagtccagacaagagctcgaaaaactcaagaggaaacttgagggagacgcctcggacttccacgagcaaatcgccgacttacaagcccaaatagcagaactgaaaatgcaactggccaagaaagaagaagaactacaagcagccctcgcgcggctagacgacgaaatcgctcagaaaaacaacgccttaaagaaaatacgagaactcgaaggacacatatccgacctccaagaagatctcgactcggaacgagcggccagaaacaaagctgaaaagcagaagagggatctaggcgaggagctagaagctctaaagaccgagctcgaagacacgctagactcaacggccacacagcaagaactacgtgcaaagagagaacaggaggtcacggttttaaagaaggccttagacgaagagacgcgcagccacgaggcacaagtacaggaaatgaggcagaaacacgcccaagccgtagaggagctgacggaacagctcgaacaattcaaaagagctaaggcgaacctagacaaaaacaaacagacattggaaaaagaaaacgcagacctagccggcgaactccgagtcctcggacaagctaagcaggaggtagaacacaaaaagaagaaacttgaagcccaggtacaagaattgcaaagcaaatgcagcgacggggagcgcgcccgcgcggagctcaacgataaagttcacaaactacagaacgaggtcgaatcggtgacgggaatgctaaacgaagcggaaggcaaagccataaaactagccaaagatgtggccagcttaagcagccaactgcaagacacacaggagttgttacaagaagaaactcggcaaaaactaaatgtaagtacaaaactccgccaactggaagaggagaggaacagcctacaggaccaactagacgaggagatggaggcgaaacaaaacctagaaaggcacatatcaaccctgaacatacaactgtcggacagcaagaaaaagctccaagatttcgcgagcacagtcgaggccctcgaagagggcaagaaacgatttcagaaggaaatcgagaacctgacacaacaatacgaggaaaaggcagcagcatacgacaaactagagaaaacaaagaaccgactccaacaagagctagacgaccttgtagtagacctggacaaccaacgacagctggtgagtaacctggaaaagaaacagcgtaagttcgatcaactgctagcggaggagaagaacataagtagcaagtacgcagatgaacgagatagagcagaggcagaggcccgggagaaagagaccaaagctctaagcctggcccgtgccctcgaagaggctctcgaagccaaggaagaactcgaaaggacgaacaaaatgcttaaagcagaaatggaagacctcgtgagtagcaaggacgacgtcgggaaaaatgtccacgaactcgaaaagtcgaaacgagcgctggagacgcagatggaagaaatgaaaacccaactggaggagcttgaggacgaactgcaagcaacagaagacgcaaagctgagactagaggtcaacatgcaagccctaaaagggcaatttgagagagacctacaggcacgagacgaacagaacgaagagaagagacgacagctgcaacgacaactgcatgagtacgagacagagctagaggatgaaaggaagcaacgcgcgctcgcagcggcggcaaagaagaaactagaaggggacctgaaggatttggaactacaagccgactcggcgatcaagggcagagaagaagcgattaaacaactgcggaagttgcaggcgcaaatgaaggacttccaaagagagctcgaggatgctagagcgagtcgcgatgaaatcttcgcaacggccaaagaaaacgagaagaaagcaaaaagcctcgaggcggacctcatgcaactacaagaggacctcgccgcagccgaacgggcgcgcaagcaagccgacctcgaaaaagaagaactcgcggaagaactcgccagctcgctatcagggcgaaacgctctccaggacgagaagagacgcctggaagcgaggatcgcacagctggaggaggaactagaggaagaacaagggaacatggaagcaatgtcagaccgcgtgcgcaaagctacacaacaagcggaacaattgagcaacgagttagcgacggaaagatcaacggctcaaaagaacgaaagtgcaagacagcaattggagcggcagaacaaagagctaaggagtaagctacacgaaatggaaggggcagttaaaagcaagttcaaaagcaccatagcggctctcgaagccaaaatagcgcaactcgaggaacaagtggaacaggaggcgcgagaaaagcaagccgcgaccaagagcttaaaacaaaaagataagaaactgaaagagatcctcctccaagtcgaggacgaacgaaagatggcagaacaatacaaggagcaagccgaaaagggcaacgcacgggtgaaacaactgaaacgacaattagaagaggcggaggaggaaagtcaacgcataaatgcgaacagacggaagctgcaacgggagctcgatgaggcgacagagagcaacgaagcgatgggtagggaggtaaacgctctaaaatcaaaactgagacgcggcaacgagacctcattcgtaccaagccgcaggagcggagggcggcgcgtcatagaaaacgctgatggctcagaagaggaaactgacacgcgagatgccgacttcaatggaactaaagccagtgagtaa

SEQ ID NO: 744 - RNA, 5838 nt, synthetic construct
  misc_feature 1..5838: note = Homo sapiens__P35749-3__SMMHC CDS opt11
  source 1..5838: mol_type = other RNA
atggcacaaaaaggacagttaagcgatgacgaaaaatttctgtttgtcgacaaaaacttcataaacagtccagtcgcacaagcagactgggcagccaaacgcctagtctgggtccctagcgaaaaacaaggattcgaagctgcaagcatcaaagaagaaaaaggagacgaagtagtcgtagagctagtagaaaacggtaagaaagtcacagtaggaaaagacgacattcagaaaatgaatcccccaaaattctcaaaagtagaagacatggcagagctcacatgtctgaacgaggcaagcgttctacacaacctaagagagaggtacttctccggactcatttacacatactcgggactattctgcgtagtagtcaacccatacaaacacttgccgatctactccgagaaaatagtcgacatgtataaaggcaagaaaaggcacgaaatgccaccccacatctacgcaatagcagataccgcgtaccgaagcatgctccaggacagggaagaccaaagtatactctgcactggcgaatccggcgcagggaaaactgagaacacaaagaaagtgatacagtatctagccgtagtggcatccagccataagggcaaaaaggacacctcaattacccagggaccctcattcgcgtacggagagcttgaaaaacaacttctccaagcaaaccccatactcgaagcattcgggaacgccaaaacagtcaaaaatgacaactccagcaggttcggaaaattcatacggatcaacttcgacgtgacaggatatatagtaggagcgaacatcgagacataccttttagagaaatcgcgagccatccgacaagcgcgagacgagaggacattccacatattttactacatgatagccggggcgaaagagaaaatgcgcagcgacctcctgctagaaggtttcaacaactacacattcctgtcaaatggcttcgtcccaatccccgccgcccaagacgacgagatgttccaagaaacagtggaagcaatggctatcatggggttcagcgaagaagaacaattaagcatattaaaagtcgtaagcagtgtactacaacttggaaacatcgtattcaagaaagagaggaacacggaccaagctagtatgccagacaacactgcagcccagaaagtatgccatctaatgggaataaacgtcactgacttcacaaggagtatcctaacaccacgaataaaagtagggagggacgtggtgcaaaaagcgcaaacaaaagaacaagcagatttcgcggtagaggccctcgccaaagcaacatacgagcggttattccgatggatactaacacgggtgaataaagcgctcgataaaacacaccggcaaggagcaagttttctaggcatactagacatcgcgggcttcgaaatattcgaagtgaatagcttcgagcagctctgtattaactatactaatgaaaaattacaacaactcttcaaccatacgatgttcatactagaacaagaagaataccaaagagagggcatagaatggaactttatcgacttcggcttggaccttcagccgtgcatcgaactaatcgagaggccgaacaatccccctggcgtactcgccctgctcgacgaggaatgctggttccccaaagcgaccgacaagagcttcgtggaaaaactctgcacagaacaagggagccacccaaaattccaaaaaccaaaacagctaaaagacaaaaccgagttcagcataatccactatgcgggaaaagtggattataacgcaagtgcgtggcttaccaaaaacatggaccctctgaatgacaatgtaacaagcctgctgaacgccagcagcgacaaattcgtagcagatctatggaaggacgtcgacagaattgtgggtttagaccaaatggcaaaaatgacagagagcagcttacccagcgcgagcaaaaccaagaaaggtatgttcaggacggtaggccaactgtacaaagaacagctcgggaagctaatgacaacgttacgaaacacaacacctaacttcgtgagatgcatcatacccaaccacgaaaagcggagcggaaaactggacgcattcctcgtgttggagcagttacgctgcaacggagtattggaaggcatacgaatatgccggcagggattcccgaaccgaattgtctttcaggagttcagacaaaggtacgagatcctggcggcaaacgccatcccgaaaggtttcatggatgggaagcaagcatgcatactcatgataaaagcgctagagctcgacccaaacttatacagaatcggccaatcaaaaatattcttccgcacgggcgttctagcccacctagaggaagaacgtgacctcaagataacagacgtaataatggccttccaagcaatgtgccgaggttacctcgcccgaaaagcatttgcgaagagacagcagcaactcacagccatgaaagtcatccagcggaattgtgcggcgtacctcaaactacggaactggcagtggtggcgactattcacaaaggtgaaaccattactgcaagtaacccgacaggaagaggagatgcaagccaaagaagacgaactccagaaaacgaaggagcggcagcaaaaagcagagaacgaactaaaggaactggagcaaaagcactcgcagctgactgaggaaaagaatttgctccaggaacaactccaggccgagacagaactttatgcagaagcagaagaaatgcgagtacggctagcagcgaagaaacaagaactggaagagatattacacgagatggaggcacggttggaggaggaggaagacagaggacaacaactgcaggcagagcggaagaaaatggcacaacagatgctggacctggaagaacagctagaggaagaggaggccgcccgccagaagctccaactggagaaagtaacagcagaggcaaaaatcaagaaactcgaagacgaaatcttggtgatggacgatcaaaacaacaaactgagcaaggagcgaaaattactagaagaacggataagcgacttgacaacgaacttagcagaagaagaagaaaaggccaaaaacctaacaaaactaaagaataaacacgaaagtatgatatctgagctggaggtgagactcaagaaggaagagaaaagtaggcaggaactagaaaaactaaaacggaaactggagggagacgcaagcgatttccacgaacagatagcagacctccaagcccagatagctgaactaaaaatgcagctagcgaagaaagaggaagaactacaagcggcactagcaaggctcgatgacgagatcgcgcagaaaaacaacgcgctgaagaaaatcagggagcttgaaggccacatcagcgacctacaagaggacctggacagcgagcgcgccgcccgaaacaaggccgagaaacagaaaagagacctcggcgaggagctggaggccctcaagaccgagctggaagatactctcgacagcacagccacacagcaggagctccgcgcaaaacgggaacaagaagtgaccgtcctcaagaaagcactggacgaggagacaaggagtcacgaggcacaggttcaagagatgcggcagaagcatgcccaagcggtcgaagaactcacagaacagctagagcaattcaaaagggcgaaagcaaaccttgacaaaaacaaacagacactagaaaaggaaaatgccgatcttgccggggaactacgagtgctcggacaagcaaaacaagaagtagaacacaagaagaagaaactcgaggcacaagtacaggagctacaatcaaagtgcagtgatggagagcgggccagagcagaactgaacgataaggtccacaaactacaaaacgaagtagaaagtgtgacaggcatgctaaacgaagcggaggggaaagcaatcaaactagcgaaagacgtggcaagcctgagctcacaactccaagacacgcaagaattactccaggaagaaactcgccagaagctcaacgtaagcaccaagctccgacaacttgaggaggagcggaacagcctccaagaccaactagacgaggaaatggaagcaaagcagaacctggaacggcacataagcactttgaacatccaactatcagactccaagaagaagctacaggacttcgcaagtacagtggaagcgttggaggaagggaagaaaagatttcaaaaggaaatcgagaacctaacgcagcaatacgaagagaaagcagcggcgtacgataagctcgagaaaaccaaaaacagactccaacaggaactcgacgatctggtagtcgacctagacaaccaaagacaactggtcagcaacctagagaagaaacagcgcaaattcgaccagctactggcagaagagaaaaacattagcagcaaatatgcagacgaacgcgaccgggctgaagcggaggcgcgagaaaaagaaacgaaagcactctcactcgcgagggcgctcgaagaagcgttagaagcgaaggaggaactagagaggaccaacaaaatgctaaaggcagaaatggaagacctggttagctcaaaagacgacgtagggaagaacgtccacgaactcgagaaaagcaaacgagccctggaaacacaaatggaagaaatgaagacacaactagaagagttagaagatgaactacaagcaacagaagacgccaaattaagactggaagtcaacatgcaggcactcaaaggacagttcgagagggacctgcaggcgagagacgagcaaaacgaagagaaaagaagacagttacaaaggcaactacacgagtacgagaccgagctggaggacgaaaggaagcagagggcccttgccgcagcagcgaagaagaaactggagggcgatctgaaggacctggagttgcaagcagacagcgcaatcaagggcagagaagaagcgataaagcagctacggaaactacaagcgcaaatgaaagacttccaacgcgaactcgaagacgcacgcgcatcccgcgacgagatattcgcaaccgcgaaggagaatgagaaaaaggcgaaaagtctagaagccgacctaatgcaactacaagaagacctggcggcggcggaacgagcgcgaaagcaagccgacctagagaaggaagaactagccgaagaactggcaagctcgctctcgggaagaaatgcgctgcaagacgaaaagagacggctagaggcaagaatcgcacagctagaagaggaactcgaagaagaacaagggaacatggaagcaatgagcgatagagtaaggaaggccacacaacaagcagaacagctatcgaacgagctggctaccgagagaagcacagcccagaagaacgagagtgcccgacaacaacttgaaagacaaaacaaagaactcaggtcaaagctacatgagatggagggagccgtaaaaagtaaattcaagagcacaatagcagccctcgaggcgaagatagcccagctcgaagaacaagtagagcaagaggcgagggaaaaacaagcagcaacgaaatccctgaagcaaaaggacaaaaagctcaaggagatactgctacaagtggaagatgagcgcaaaatggctgagcaatacaaggagcaagcagaaaaaggaaatgcaagggtgaaacaactgaaaagacagctggaagaggccgaggaggaatcgcagcgcataaatgcaaatagaagaaaacttcaacgggaacttgacgaggctacggaatcaaacgaggccatggggcgggaagtgaacgcactaaaaagtaaactaaggggaccacctccacaggaaacaagccagtaa

SEQ ID NO: 745 - RNA, 5817 nt, synthetic construct
  misc_feature 1..5817: note = Homo sapiens__P35749-4__SMMHC CDS opt11
  source 1..5817: mol_type = other RNA
atggcccaaaaaggtcaattaagcgacgacgaaaaatttctcttcgtagacaaaaacttcatcaactcacccgtagcccaagctgactgggcggcgaaaaggctagtgtgggtgccctccgaaaaacaaggatttgaagcggcaagcatcaaagaagaaaaaggagacgaagtagtagtagagctagtcgaaaacggcaagaaagtcacagtgggaaaagacgacattcagaaaatgaacccgccgaaattcagcaaagttgaagacatggccgaacttacttgcctaaacgaagccagcgtactccataacctgagggaaagatactttagcgggctcatctacacgtactcaggcctattctgcgtcgtagtcaacccctacaaacacctccccatctactccgagaaaattgtcgacatgtataaaggaaagaaacgtcatgaaatgccgcctcacatctatgcaatcgccgacacagcatacagaagcatgctgcaagatcgagaagaccagagcatactatgtaccggggaaagcggggcgggaaaaaccgagaacacaaagaaagtaattcaatacctcgcagtggtggcgtcaagccacaaaggcaagaaagacacaagtataaccggagaactcgaaaagcagctgctacaggcgaaccccatactcgaagcatttggaaacgcgaaaacggtgaagaacgataatagtagccggttcggaaagttcatcagaatcaatttcgacgtaaccgggtacattgtaggcgccaatatcgaaacgtacctgttagagaaaagccgcgcaatacggcaagctagagacgaacggacgtttcacatattttactacatgatagcaggggcgaaagaaaagatgagaagcgatctcctgctggaggggttcaataactacacatttctgagcaacggattcgtaccgattccggcggcccaagacgacgaaatgtttcaggaaacagtcgaagccatggccatcatgggcttctccgaagaagaacaactcagtatactaaaggtagtgtccagcgtcttgcagctagggaacatcgtgttcaagaaagaaagaaacaccgaccaagcgtccatgccagataacacggccgcgcaaaaggtgtgccaccttatgggaataaacgtaacagatttcacgcgaagcatccttacaccacgaatcaaagtcggacgggacgtggtacaaaaagcacaaactaaggaacaggcagacttcgcggtcgaggccttggcgaaggcaacatacgaaagactcttccgatggatattaacaagagtgaacaaagcgcttgacaagacacacaggcagggagccagcttcctgggcattctggacatcgccggctttgagatattcgaggtcaactcgttcgaacaactatgcataaactacactaacgaaaaactccagcaactcttcaaccacacgatgttcatcctggaacaagaggaatatcagagagaggggatagaatggaacttcatcgatttcggcctggacctacagccatgcatagagctaatagagaggcccaacaaccctccaggcgtattggcactactcgacgaagaatgctggttcccaaaagcaacagacaagtcatttgtcgagaagctctgtacggaacagggaagtcatccaaaattccaaaaaccaaagcagctaaaagacaaaacggagttcagcataatacattacgcaggtaaagtggattacaatgccagcgcgtggctcaccaaaaacatggaccccctaaacgacaatgtgacaagtctgctcaacgcgagtagcgacaagtttgtagcagacttgtggaaagacgtagaccgaatcgtcggcctcgaccaaatggcgaagatgacggaaagcagcctaccgtcggcgagcaagacgaagaaaggaatgttccggacagtaggccagttgtacaaagagcaactcgggaaactcatgacgacattacgaaacacgacaccgaactttgtacggtgcattatcccaaatcacgagaaaaggtccggaaaacttgacgcattcctcgtactcgaacaactcagatgtaatggggtactggaaggaataagaatctgcagacaaggattcccgaaccgaatcgtcttccaagagttcagacaacggtacgagatcctcgcggcaaatgcgataccaaaagggtttatggacggcaaacaagcatgcatactcatgatcaaagccctcgaattagacccaaatctctacagaataggccagtcgaagatcttcttcagaacaggagtcctagcacacctcgaagaagaaagagacctaaagataacagatgtgataatggccttccaagcgatgtgtcggggatacctagcgcgcaaggctttcgccaaaagacagcagcagctcacagccatgaaggtgatccagcgcaactgcgccgcctatcttaaactacggaattggcagtggtggcggctgttcacgaaggtaaagccactcctccaagttacgcgccaggaagaggaaatgcaagcaaaggaggatgagctgcagaaaactaaagaacgccagcagaaagccgagaacgaactgaaggaattggaacaaaaacactcacaattgaccgaagagaaaaacctactgcaggaacaactgcaggccgaaaccgagctatacgcggaggcagaggagatgagggtgagattagcagccaagaagcaggaactcgaagaaatactacacgagatggaagctaggcttgaagaagaggaggaccgcggacaacaactccaggcagaacgtaagaaaatggcccagcaaatgctcgatttggaagaacaattggaagaggaggaagcggcccgacaaaagctccaactcgaaaaggtcacggctgaagcaaaaatcaaaaagttggaagacgagatattagtaatggacgaccaaaacaacaagctaagtaaagaacgtaagctcctcgaagagaggataagcgatctcacaacaaacctggcggaggaggaagaaaaggccaaaaacctaacaaaactcaagaacaaacatgagagcatgatctcagaactagaggtaagactaaagaaagaggagaaaagccgacaagaactagaaaaactgaagcgcaaactcgaaggagacgccagtgacttccacgagcaaatagcagacttgcaagcacagatcgccgagctcaagatgcaactagccaaaaaggaagaggaactacaagcagcgctcgccagactagacgacgagatcgcacaaaagaacaatgccctaaagaaaatcagagaactagaaggtcacatatcagacctccaggaggatctcgatagcgagcgtgccgcacggaacaaagccgaaaagcagaaacgcgacctgggtgaggagctggaagccctcaaaaccgagttggaagatactctggactccaccgctacgcaacaagaactcagagctaagagagaacaagaagtgaccgtattgaagaaggctctggacgaggaaacgcgcagccacgaagcacaagtgcaagaaatgcggcagaaacacgcccaagccgtggaagaactcacagagcaactagagcaattcaaaagggcgaaagcgaacctagacaagaacaagcaaacattggagaaggaaaacgccgacttggccggcgaactcagagtactggggcaggcgaaacaagaggtagaacataagaagaagaaactggaagctcaagtgcaggaactacaaagcaaatgcagcgacggagaaagagcgagggccgaactaaacgacaaggttcataagctccaaaacgaggtcgagagtgtaacagggatgctcaacgaagccgaaggcaaggcaatcaaactcgccaaagacgtagcgtcgctctcaagccaactgcaagacacgcaagagctgctccaggaagaaactagacaaaaacttaacgtgagtaccaagctacgccaactcgaggaggagcgcaacagcctacaagaccaattagacgaggaaatggaagcaaaacaaaacctcgaacgccacataagtacgcttaacatacagctgagtgacagcaagaaaaagctacaggacttcgccagcacggtggaggccctcgaagaggggaagaaacgcttccaaaaagagatagaaaacctgacgcaacaatacgaagaaaaagcagcggcttacgacaaactagaaaagacgaaaaaccgactccaacaagaactagatgacctcgtagtagacctcgataatcaaaggcagctagtcagcaacctggaaaagaaacagagaaaattcgatcagctactcgcagaagagaaaaacataagcagcaaatatgcggacgagcgagacagagcagaggcagaggccagagaaaaagagaccaaagcactcagcctggcgcgggcgctagaggaggccctcgaggcgaaagaggaactagaacgcaccaataaaatgctcaaagcggagatggaagacctagtgtcgagcaaggacgatgtggggaagaacgtacatgagctcgagaaaagcaaacgggcactggagacgcagatggaagaaatgaagacccaactggaagaactggaggacgaactgcaagcaacggaggatgcaaaactacgactagaggtcaacatgcaagcactgaagggacagttcgaaagggacctacaagccagggacgaacaaaacgaggagaaacggcggcagctacaacggcagctacatgagtacgaaaccgaactagaggacgagcgaaaacagcgggcgctagctgcggctgccaagaagaaactcgaaggagacctgaaggatttggaacttcaagcagatagcgcgataaagggcagagaagaagctatcaaacaactgcggaaactacaagcacaaatgaaagatttccaacgcgaactggaggatgcacgggcgagtagagatgagatctttgcgactgccaaggaaaacgaaaagaaagcgaaatccttagaagctgacctcatgcaactgcaagaggacctggccgccgccgaacgcgcacgaaaacaagcagacctggaaaaagaagaactggcagaggaattagcgagcagccttagcggtagaaacgcgctgcaagatgagaaaagaagactcgaggcccgaatcgcccaactggaggaggaactagaagaggaacagggcaatatggaagcgatgagcgatcgcgttagaaaagcgacacagcaggcggaacaactaagtaacgaattagcgacagaaaggtcaacagcccagaagaacgagtcagcgagacaacagctagaaagacaaaacaaagagcttagatccaagctgcacgagatggaaggagcggtgaagtcaaagttcaaatctacaatcgcagccctcgaagccaagatagcacagttagaagaacaggtagagcaggaggcccgagaaaagcaagcagcaaccaagagcttaaaacagaaagacaagaaactcaaagaaatactgctccaagtcgaagacgaaaggaaaatggccgagcaatacaaagaacaagcagaaaaaggcaacgcacgggtgaaacaactgaaacggcaattggaagaagccgaggaagaatcccaacgtatcaatgcgaacagaagaaaactacaacgagagctcgacgaggccaccgagtcaaacgaagcaatgggtagagaggtaaacgccctaaagagcaagctgcgcggcccacccccacaagagaccagccaatga

SEQ ID NO: 746 - RNA, 1338 nt, synthetic construct
  misc_feature 1..1338: note = Homo sapiens__P35749-1__SMMHC(1527-1972) CDS opt11
  source 1..1338: mol_type = other RNA
gtacacgaactagaaaagagcaagagggcgctagagacacagatggaggaaatgaaaacacaactggaggagctagaagacgagctacaggcgacagaggacgcaaaactaagactggaggtaaacatgcaggcactgaaggggcaattcgaaagagacctgcaggcaagggacgaacagaacgaggaaaagagaagacaactacaaagacaactgcacgagtacgagacggagctcgaggacgaaagaaaacaaagggcgctggcggcagcagcaaagaagaaactagagggggacctgaaagacctggaactgcaagcagatagcgcgataaagggaagagaagaggcaataaaacaactaaggaagctgcaagcgcagatgaaagatttccaaagagagctcgaggacgcgagggcgagtagagacgaaatattcgcgacggcaaaagaaaacgagaagaaggcgaaaagcctagaggcagacctaatgcagctacaagaggacctagcggcggcggagagagcgagaaaacaagcagacctggagaaggaggagctagcggaagaactagcgagcagcctaagcgggaggaacgcgctgcaagacgaaaagcgaagactggaagcaaggatagcccagctagaggaggagctcgaagaggagcagggaaacatggaagcgatgagtgatagagtgaggaaggcgacccaacaggcagaacagctcagcaacgaactagcgacagagagatcaacagcgcagaagaacgagagcgcgagacagcaactggaaagacaaaacaaagagctaaggagcaagctgcacgaaatggagggagcagtgaaaagcaagttcaaaagcacaatagcagcactcgaggcaaagatagcgcagctggaggaacaagtagaacaggaggcgagagagaaacaggcggcaacaaagagcctaaagcagaaggataaaaagctaaaggagatactgctgcaagtggaagacgaaaggaagatggcagagcaatacaaagagcaagcggaaaagggaaacgcgagggtaaagcagttaaaaaggcaactggaggaggcagaagaagagagccagagaataaacgcgaacaggagaaagctacagagagaactagacgaggcgacggaaagcaacgaagcgatgggaagagaggtaaacgcgctaaagagcaaactgagaaggggaaacgaaacgagcttcgtgccgagcagaagaagcggagggcgaagggtaatagagaacgcagacggaagcgaggaggagacagacacgagagacgcagacttcaacggaacaaaagcgagcgag

SEQ ID NO: 747 - RNA, 1053 nt, synthetic construct
  misc_feature 1..1053: note = Homo sapiens__P35749-1__SMMHC(1527-1877) CDS opt11
  source 1..1053: mol_type = other RNA
gtacatgagctggaaaagagcaagagagcgctcgagacgcagatggaggaaatgaaaacgcaactggaagaactagaagacgaactacaggcaacagaagacgcaaagctgaggctagaagtaaacatgcaggcactgaaaggacaatttgaaagggacctgcaagcgagagacgagcagaacgaggagaagagaaggcaactgcaaaggcaactgcacgagtacgagacggagctagaggacgagagaaagcaaagagcgctggcggcagcagcgaaaaagaaattggaaggggacctgaaagacctagagctacaggcagacagtgcaataaagggaagggaagaggcaataaagcagctaaggaagctgcaagcgcaaatgaaagacttccagagagagctagaggacgcgagggcgagcagagacgagatattcgcaacggccaaagaaaacgaaaagaaagcgaaaagcctggaggcagacctaatgcaactacaagaagacctggcagcagcagagagagcgagaaagcaagcggacttggagaaggaagaactggcggaggagctagcgagcagcctaagcgggaggaacgcactacaggacgagaaaaggagactggaagcgagaatagcacagctcgaagaggagctagaggaggagcagggaaacatggaagcaatgagcgacagggtgaggaaggcgacacaacaagcggaacagctgtcgaatgagctagcgacagagagaagcacggcacagaagaacgagagcgcgagacagcaactggagaggcaaaacaaggagctaaggagcaagctgcacgagatggaaggggcagtaaaaagcaagttcaaaagcacgatagcggcgctagaggcaaagatagcgcaactggaagaacaggtggaacaggaagcgagagagaaacaggcagcgacaaagagcctgaaacaaaaagacaaaaagctaaaggaaatactgctgcaagtggaagatgaaaggaaaatggcagagcagtacaaggagcaagcggaaaagggaaatgca

SEQ ID NO: 748 - RNA, 492 nt, synthetic construct
  misc_feature 1..492: note = Homo sapiens__P35749-1__SMMHC(1809-1972) CDS opt11
  source 1..492: mol_type = other RNA
aagagcaagttcaagagcacgatagcggcgttggaggcgaagatagcgcagctagaggagcaggtggagcaggaggcgagggagaagcaggcggcgacgaagagtctgaagcagaaggacaagaagctgaaggagatattgctacaggtggaggacgagaggaagatggcggagcagtacaaggagcaggcggagaaggggaacgcgagagtgaagcagctgaagaggcagctagaggaggcggaggaggagagccagaggataaatgcgaatagaaggaagctgcagagggagttggacgaggcgacggaaagtaacgaggcaatggggagggaggtgaacgcgctgaagagcaagctgaggagggggaacgagacgagtttcgtgccgagtagaaggagcggggggaggagggtgatagagaacgcggacgggagcgaggaggagacggatacgagggacgcggactttaacgggacgaaggcaagtgag

SEQ ID NO: 749 - RNA, 207 nt, synthetic construct
  misc_feature 1..207: note = Homo sapiens__P35749-1__SMMHC(1809-1877) CDS opt11
  source 1..207: mol_type = other RNA
aagagcaagttcaagagcacgatcgcggccttggaagcgaaaatagcccagctcgaggaacaggtcgagcaagaggccagggaaaagcaagcggccacgaaatcgctcaagcaaaaggacaagaaattgaaagagatcttgctccaggtcgaggacgagcgcaagatggcggaacagtacaaggaacaggccgagaaagggaacgcg

SEQ ID NO: 750 - RNA, 69 nt, synthetic construct
  misc_feature 1..69: note = Artificial____Lifeact CDS opt11
  source 1..69: mol_type = other RNA
ggggtggcggatctgataaagaagtttgagagcataagcaaggaggagggggatccgccggtggcgacg

SEQ ID NO: 751 - RNA, 51 nt, synthetic construct
  misc_feature 1..51: note = Saccharomyces cerevisiae S288C__NP_014882.4__Lifeact(1-17) CDS opt11
  source 1..51: mol_type = other RNA
atgggggtggcggatctgataaagaagttcgagagcataagcaaggaggag

SEQ ID NO: 752 - RNA, 2481 nt, synthetic construct
  misc_feature 1..2481: note = Homo sapiens__Q16665-1__HIF1alpha CDS opt11
  source 1..2481: mol_type = other RNA
atggaaggagccgggggcgcgaacgacaagaaaaagatatcaagcgaacgcagaaaagaaaaatcccgagatgcagcacgatcccgccgaagtaaagaaagcgaagtcttttatgaactcgctcaccaactccccctaccccacaacgtaagcagccacctcgataaagcctctgtaatgcgattaaccatctcatacctacgagtacgtaaactcctggatgcaggcgacctcgacatagaagacgacatgaaagcacaaatgaactgcttctacctgaaagccctcgacggcttcgtaatggtactcacagatgacggcgacatgatatacatctccgacaacgtaaataaatacatgggcctcacccaattcgaactcacaggccacagcgttttcgacttcacccacccctgcgaccacgaagaaatgcgagaaatgctaacccaccgtaatggcctcgtaaagaaaggcaaagaacaaaacacacaacgctccttcttcctccgaatgaaatgcacactcaccagccgaggacgcaccatgaacatcaaatccgctacttggaaagtactccactgcaccggccatatccatgtctacgacaccaacagcaaccaaccccaatgcggatacaagaaaccgcccatgacttgcctcgttctcatctgcgagcccataccccacccctccaacatcgaaatacctctcgacagcaaaaccttcctatcccgacacagcctagacatgaaattctcatactgcgacgagcgaataacagaactcatgggatatgaaccggaagaattactagggcgatccatctacgagtactaccacgccctcgactcagaccacctcaccaaaacccaccacgacatgttcactaaaggccaagtaacaacaggccaataccgcatgctagccaaacgaggtggttacgtctgggtagaaacacaagccaccgtaatctataacactaaaaacagccaaccacaatgcatcgtatgcgtaaactacgtagtctcaggcattatccaacacgatctcatcttctccctacagcaaaccgaatgcgtactcaaaccagtagaatccagcgacatgaaaatgacccaactcttcaccaaggtcgaatcggaagatacatcctcactattcgataaactcaagaaagaaccggacgcactcaccctcctcgcccccgccgccggtgataccataatttccctggacttcggctcaaacgacaccgagaccgacgatcaacaactagaagaagtaccactatacaacgatgtaatgctcccatcccccaacgaaaaactccagaatatcaaccttgccatgtcccctctacccacagcagaaacccccaaacccctccgctcatccgccgatccggctctcaatcaagaggtcgctctcaaactcgaacccaaccccgagtctctcgaactcagctttaccatgccacaaatacaagatcaaacccccagccccagcgacggatctacaaggcagagctccccagaaccaaactccccatccgaatactgcttctacgtagactccgatatggtcaatgagttcaaactagagctagtcgaaaaactattcgcagaagacaccgaagccaaaaaccccttttcaacacaagacaccgacctagacctggaaatgctcgctccctacatacctatggacgacgatttccaactccgctcattcgaccaactctcacccctcgaatcttcaagcgcaagccccgaatccgctagcccgcagtccactgtcaccgtcttccaacaaacacaaatacaagaaccaaccgccaacgccacaacaacaactgccaccaccgacgaactcaaaactgtgactaaggacagaatggaagacatcaaaatcctcatcgcatcaccctccccaacccacatacacaaggagaccacttccgccaccagctcaccttaccgcgacacccagtcccgaacagcctccccaaaccgtgccggtaaaggagtaatagaacagaccgagaaaagccacccgcgctcccctaacgtactttcagtggccctatcccagcgaaccaccgtccccgaagaggaactcaaccctaagatactcgccctgcaaaacgcccaacgaaaacgtaaaatggaacacgacggatcactctttcaagccgtaggaatcggaaccctactacagcaacccgacgaccacgccgcaacgacctcactaagctggaaacgagttaaaggctgcaaatcatccgaacagaatggcatggaacagaaaacaataatcctaataccctctgacctcgcctgccgactactcggtcaatccatggacgaatcaggcctaccacaactcaccagctacgactgcgaagtaaacgcccccattcaaggctcccgcaacctactccaaggcgaagaactactccgagcattagaccaagtcaattaa

SEQ ID NO: 753 - RNA, 81 nt, synthetic construct
  misc_feature 1..81: note = Homo sapiens__Q16665-1__HIF1alpha(549-575) CDS opt11
  source 1..81: mol_type = other RNA
cccttctccacccaagacaccgacctcgacctcgaaatgctcgccccctacatccccatggacgacgacttccaactccgc

SEQ ID NO: 754 - RNA, 45 nt, synthetic construct
  misc_feature 1..45: note = Artificial____Linker CDS opt11
  source 1..45: mol_type = other RNA
ggggggagtggggggagtggggggagtggggggagtggggggggg

SEQ ID NO: 755 - RNA, 1362 nt, synthetic construct
  misc_feature 1..1362: note = Homo sapiens__Q01196-1__RUNX1(K83E_R174Q) CDS opt11
  source 1..1362: mol_type = other RNA
atgcgcatcccagtagacgcctcaacctcacgtcgcttcacccctccctcaacagccctctcacccggcaaaatgtccgaagcattacccctcggtgcccccgacgcaggcgcagcactcgccggcaaacttcgatctggcgaccgatccatggtcgaagtcctagccgaccaccccggcgaactcgtacgaacagactcacccaatttcctctgctccgtcctccccactcactggcgctgcaacgaaaccctgcccattgccttcaaagtcgtcgcacttggcgacgtcccagacggcaccctagtaacagtaatggccggaaacgacgaaaactactcagcagaactacgcaacgccaccgccgccatgaaaaaccaagtagcccgcttcaacgatctacgattcgtcggccgatccggacgtggcaaatccttcactcttacaatcacagtcttcacaaatcccccacaagtcgccacctaccaccgcgccatcaaaattaccgttgacggcccccaagaaccaagacgccatcgtcaaaaacttgacgaccaaaccaaacccggctcactatcattctccgaacgcctctccgaactcgaacaactccgccgcaccgccatgcgcgtctcaccccaccaccccgctcccacaccaaaccccagggcctcccttaaccactccaccgcattcaacccccaaccacaatcccaaatgcaagacacacgacaaatacaaccatccccaccgtggtcatacgaccaatcttaccaatacctcggttctatagcctccccatccgtccacccagccacacccatctcccccggccgcgcatccggaatgaccacactctcagccgaactctcctcccgcctatcaaccgcccctgacctcaccgccttttccgacccccgacaattccccgcactaccgtcaatctccgacccccgaatgcactatcccggcgccttcacctactcccccacacctgtaacctccggcatcggcatcggcatgtccgccatgggaagcgccaccagatatcatacttacctacccccaccttatccaggatcctcacaagcccaaggcggcccttttcaagcctcctccccctcctaccatctctactacggcgcctccgccggctcctaccaattctccatggtcggcggcgaacgatcaccaccccgaatcctccctccctgcaccaacgcatcgaccggatcggccctcttaaacccctccctccccaaccaatcagacgtcgtcgaagccgaaggatctcactccaactcccccacaaacatggcaccttcagcccgcctcgaagaagccgtctggcgcccctactaa

SEQ ID NO: 756 - RNA, 1362 nt, synthetic construct
  misc_feature 1..1362: note = Homo sapiens__Q01196-1__RUNX1 CDS opt11
  source 1..1362: mol_type = other RNA
atgcgcatacccgtcgacgcctcaacgtcacgccgcttcacccctccctcgacagcactatcacccggcaaaatgagcgaagcactccccctcggtgcccccgacgctggtgccgcacttgcaggcaaactacgttccggcgaccgttccatggttgaagtcctcgccgaccaccccggagaactcgtccgtaccgactcccccaacttcctctgttccgtcctccccacccactggcgctgcaacaaaacactccccatcgcttttaaagtagtcgcactaggcgacgtacccgacggcaccctcgtcacagtcatggccggtaacgacgaaaactactcagccgaactccgcaatgccaccgccgccatgaaaaaccaagtcgcccgtttcaacgacctcagattcgtaggccgctctggccgtgggaaatccttcacgctcaccataactgtctttaccaacccaccccaagtagctacataccaccgcgcaataaaaattaccgtagacggcccccgtgagcctcgacgccaccgtcaaaaactagacgaccaaaccaaacccggctccctctctttctccgaacgcctctcagaactcgaacaacttcgacgcaccgccatgcgcgtatctccccaccaccccgcgcccacccccaacccacgagcatccctcaaccactccaccgccttcaacccccaaccccaatcccaaatgcaagacacccgacaaatccaaccttcccctccctggtcttacgaccaatcataccaatacctcggctctatagccagcccctcagtccaccccgccacacccatctcaccaggccgcgcctccggcatgaccacactctccgctgaactctcaagccgactttccaccgcacctgatctcaccgctttctcagacccccgccaattcccagcactcccctctatctccgaccccagaatgcattacccaggcgcttttacctactcccccacccccgtcacatcaggaatcggcataggcatgtctgcaatgggcagcgccacccgctaccacacctaccttccccctccctaccccggatcttcacaagcccagggcggccccttccaagcctcctccccctcctaccacctatactacggagcttccgccggaagctaccaattctccatggtcggcggcgaacgatccccaccccgaatactcccaccctgcaccaacgcatcaaccggatccgccctactaaacccctccctccccaaccaatcagacgtcgtcgaagccgaaggctcccactcaaactcccccacaaacatggccccctccgcccgcttagaagaagccgtctggcgcccctactaa

SEQ ID NO: 757 - RNA, 1443 nt, synthetic construct
  misc_feature 1..1443: note = Homo sapiens__Q01196-8__RUNX1 CDS opt11
  source 1..1443: mol_type = other RNA
atggcctccgactccatcttcgaatccttcccttcctacccccaatgctttatgcgagaatgcatcctcggcatgaacccctcccgcgacgtacacgatgcctccacttcccgacgattcacacccccttccaccgcactctccccaggaaaaatgtccgaagccctacccctgggcgcccccgacgccggagccgccctagcaggcaaactccgctcaggcgaccgctcaatggtcgaagtcctcgcagaccaccctggcgaacttgttcgcaccgattcaccaaacttcctttgctcagtactacccacccactggcgttgcaacaaaaccctaccaatcgccttcaaagtcgtcgccctcggcgacgttccggacggcactctcgttaccgtaatggccggcaacgacgaaaactactcagcagaactacgcaacgccacagccgcaatgaaaaaccaagtagcacgcttcaacgaccttcgcttcgtaggtagatccggccgaggcaaatccttcacactaacaatcaccgtcttcaccaatcccccacaagtcgccacgtaccaccgcgccatcaaaatcaccgtcgacggaccccgcgaaccacgtcgtcaccgccaaaaactcgacgaccaaaccaaaccaggatccctctccttctcagaacgactttccgaactagaacagctccgccgcaccgccatgcgcgtatcaccccaccaccctgctcctacccccaaccccagagcttcccttaaccactccaccgcattcaacccccaaccacaaagccaaatgcaagacaccagacaaatacaaccctccccgccatggtcatacgaccaatcataccaataccttggctcaatagcatccccctccgtccaccccgccacccccatcagccctggccgcgcctccggcatgaccaccctctccgccgaactgtccagccgactctccaccgcccccgacctcactgccttctcagacccacgacaattccccgcactcccctcaatctccgacccccgcatgcactaccccggcgccttcacgtactcaccaacccccgtaacctcaggtataggcataggcatgtccgcaatgggctccgccacccgctaccacacctatctacctcctccctaccccggatcttcccaagcacaaggcggccccttccaagcatcctccccatcataccacctctactacggagcatccgccggctcttatcaattctccatggtaggcggagagcggtctcccccacgcatcctaccaccctgcaccaacgcctcaaccggttctgcattactcaacccatccctaccaaaccaatccgacgtagtagaagccgaaggctcccactcaaacagccccaccaacatggccccctcagctcgcctcgaagaagctgtttggcgcccctactaa

SEQ ID NO: 758 - RNA, 1419 nt, synthetic construct
  misc_feature 1..1419: note = Homo sapiens__Q01196-2__RUNX1 CDS opt11
  source 1..1419: mol_type = other RNA
atgcgtatacccgtcgacgccagcaccagcagacgcttcaccccaccctccaccgcactctcccccggcaaaatgtcagaagccctacccctcggcgcccccgacgctggcgccgccctagctggcaaactccgatccggcgaccgatcaatggtcgaagtcctagccgaccaccccggagagctagtccgcaccgactcccccaacttcctctgctcagtcctacccacccactggcgctgcaacaaaaccctccccatcgccttcaaggtagtcgcactaggcgacgtccccgacggcacgctagttaccgtcatggccggaaacgacgaaaactactccgctgaactccgcaacgccactgccgcaatgaaaaaccaagtcgcccgattcaacgacctccgcttcgtcggccgctctggccgcggcaaatccttcaccctaacaataaccgtcttcactaatcccccgcaagtcgccacctaccaccgcgccatcaaaatcactgtcgacggccctagagaacccagacgacaccgccagaaactcgacgaccaaacaaaacccggctccctttccttctcagaacgcctatcagagctagaacaactacgaaggaccgccatgcgtgtatcaccccatcaccccgccccaactccaaacccccgcgcctcccttaaccactccaccgcattcaacccccaacctcaatcccagatgcaagacactcgacaaatacagccctctccaccctggtcttacgaccaatcctaccaatacctcggctccatcgcatctccatctgtccaccccgcaacccccataagccccggccgagcctcaggcatgaccacactatccgcagaactctcatcccgcctatcaaccgctcccgaccttaccgccttcagcgacccccgccaattcccagccctcccatccatctccgatcctcgaatgcactaccccggcgcgttcacatactcacccacaccagtcacttctggcatcggcattggcatgtccgcaatgggatccgccacccgctaccacacctacctccctccaccctacccaggctcatcacaagcccaaggcggcccctttcaagcctcatcaccctcctaccacctatactatggagcctcagcaggatcctatcaattctctatggtcggcggcgaacgctcccctccccgaatactcccaccatgcaccaatgcatcaaccggatctgcactattaaacccctccctccccaaccaatcagacgtcgtcgaagcagaaggctcccactcaaactcaccaacaaacatgggcggcgcatcttgctccagacaagcccgccgcgaccccggcccctgggcccgcaccccatcatggggacggggccgccccacagaccgaatctccctctaa

SEQ ID NO: 759 - RNA, 1419 nt, synthetic construct
  misc_feature 1..1419: note = Homo sapiens__CAA56092.1__RUNX1 CDS opt11
  source 1..1419: mol_type = other RNA
atgcgaataccagtcgacgcctccacctcccgacgattcactcccccaagcacagcactctcccccggcaaaatgtccgaagcactccccctaggcgctccagacgccggagctgccctcgccggcaaactacgctcaggagaccgatccatggtcgaagtcctcgccgaccacccaggcgaactcgtccgcaccgactcacccaacttcctatgctccgtccttcccacacactggcgctgcaacaaaaccctccccatcgcattcaaagtcgtcgccctcggcgacgtccccgacggaaccctcgtaaccgtaatggcaggcaacgacgaaaattactcagccgaattaagaaacgccactgccgccatgaaaaaccaagtagcccgtttcaacgaccttagattcgtaggccgctccggacgcggcaaatccttcaccctaacaatcaccgtattcacaaatcccccacaagtagccacctaccatcgcgccatcaaaatcacagtagacggcccccgtgaaccccgccgtcaccgccaaaaactcgacgatcaaaccaaacccggatcactatccttctccgaacgcttatccgaactcgaacaacttcgacgtacagccatgcgagtatcaccacaccacccagcccccacccccaacccccgcgcatccctcaaccactccaccgcgttcaacccccaaccacagtcacaaatgcaagatacacgtcaaatacaaccttccccaccctggtcatacgaccaatcataccagtacctcggctccatagcctccccctccgtccaccccgccactcccatctcaccaggccgcgcatccggcatgaccacactctccgccgaactatcctcacgcctatccaccgcacccgacctcaccgccttctccgacccacgccaattccccgccctaccatccatctcagacccccgcatgcactaccccggtgcattcacatactcgccaaccccagtcacctccggcatcggtataggcatgtctgccatgggatcagccacccgctatcacacatacctcccacctccctaccccggctcatcccaagcccaaggcggtccattccaagcctcctcaccttcataccacctctactacggcgcatcagccggatcataccaattctccatggttggaggcgaacgctccccaccccgaatactccctccctgcacaaacgcctccaccggctcagccctccttaacccctccctacccaatcaatctgacgtagtcgaggccgaaggacgccaccgcaactcacctaccaacatgggcggagcctcctgctcccgccaagcccgacgcgacccaggcccctgggcccgaaccccctcctggggacgtggccgccccaccgacagaatctcactttaa

SEQ ID NO: 760 - RNA, 1407 nt, synthetic construct
  misc_feature 1..1407: note = Homo sapiens__Q01196-10__RUNX1 CDS opt11
  source 1..1407: mol_type = other RNA
atgcccgccgcgccccgcggcccagcccaaggcgaagccgccgcccgcacacgctcccgagacgcctctacttcacgtcgattcactccaccatcaacagcactatcccctggcaaaatgtcagaagctctcccattaggagcaccagacgccggcgccgccctcgcaggaaaactccgctccggcgaccgcagcatggtcgaagtccttgcagaccaccccggcgaactcgtacgcacagactcacccaactttctctgctctgtactcccaacccactggcgatgtaacaaaaccctacccatagccttcaaagtcgtcgccctcggagatgtccccgacggaacactcgtaaccgtcatggccggcaacgacgaaaactactccgcagaactacgcaacgccacagccgcaatgaaaaaccaagtcgccagattcaacgacctccgtttcgtaggccgctcaggccgcggcaaatccttcaccctcaccatcacagtcttcactaatccccctcaagtcgccacctaccaccgagcaatcaaaatcaccgtcgacggcccccgagaaccccgacgccaccgccagaaactagatgaccaaaccaagccaggctcactttcattctcagaacgactatcagaactcgaacaactacgccgtaccgccatgcgcgtatctccccatcacccagcaccaacccccaacccacgcgcctcacttaaccactccaccgccttcaatccccaacctcaatcccaaatgcaagacacccgtcaaatccaaccatcaccaccgtggtcatacgatcaatcctaccaatacctaggctccatcgcctcaccctcagtacaccccgcaacccccatctcccctggccgagcatcaggcatgacaaccctctccgccgaactatcctcccggctctcgaccgcccccgacctaacagcattctccgaccccagacaattccccgcactcccctccatctcagacccccgtatgcactaccccggcgcctttacatactcaccaacccccgtcacttctggcataggcatcggcatgtccgccatgggctccgcaacccgctaccacacatacctaccaccaccctaccccggctcctcacaagcccaaggcggccccttccaagcctcctcaccctcctaccatctctactacggagcctctgccggctcttaccaattctcaatggtaggcggcgaacgctctcccccacgcatactcccaccctgtacaaatgcatcaaccggatcagcattactcaacccctccctccccaaccaatcagacgtcgtcgaagccgagggatcacactccaactcccccaccaatatggccccctccgcccgactcgaagaagccgtctggcgaccctactaa

SEQ ID NO: 761 - RNA, 1371 nt, synthetic construct
  misc_feature 1..1371: note = Homo sapiens__Q01196-9__RUNX1 CDS opt11
  source 1..1371: mol_type = other RNA
atgaacccctcacgcgacgtccacgacgcctcaacctcccgacgatttactccaccctccaccgctctctcccccggcaaaatgtccgaagccctacccctaggcgcccctgacgcaggagccgcactcgccggcaaactccgctcaggagatcgctccatggtagaagtcctagccgatcaccccggcgaactcgtccgcaccgactcccccaacttcctttgctccgtcctgcccacccactggcgctgcaacaaaaccctaccaattgcattcaaagtagtcgccctcggtgacgtccccgacggaacactcgtaaccgtcatggccggcaacgacgaaaactactccgctgaattacgcaacgccaccgccgccatgaaaaatcaagtcgcccgcttcaacgacctacgattcgtcggaagatcaggacgaggtaaatctttcaccctcacaatcaccgtatttaccaacccaccccaagtcgccacctaccaccgcgcaataaaaatcacagtagacggcccccgagaaccccgccgccaccgccaaaaacttgacgaccaaaccaaacccggctccctctccttttcagaacggctctctgaactcgaacaactacgtcgcaccgccatgcgagtctcaccccaccaccccgcccccacccccaacccaagggcctcactcaaccactccaccgccttcaacccccaaccacaatctcaaatgcaagacacccgccaaatccaaccctcaccaccctggtcctacgatcaatcctaccaatacctcggttcaatcgcctccccctccgtccaccccgccacacccatatcccccggccgagcatccggaatgaccacattatctgcagaactctcgtcccgcctctccacagcaccagacctaaccgccttcagcgacccacgacagttccccgccctcccctccatctcagacccccgaatgcactacccaggcgctttcacatactcccctactccagtcacctccggcatcggaataggaatgtccgcaatgggatccgcaacaagataccacacctaccttcctccaccatacccaggatcctcacaagcccaaggaggccccttccaggcatcctccccctcataccatctctactacggtgcctcagccggctcctaccaattctcaatggtaggaggcgaacgctccccaccacgcatcctccctccttgcaccaacgcctcaaccggcagcgccctcctaaacccctctctccccaaccaatcagatgtcgtcgaagccgaaggctcccactcaaactcccccacaaatatggccccctccgcccgactcgaagaagccgtctggcgcccatactaa

SEQ ID NO: 762 - RNA, 1362 nt, synthetic construct
  misc_feature 1..1362: note = Homo sapiens__AAA51720.1__RUNX1 CDS opt11
  source 1..1362: mol_type = other RNA
atgcgcatacccgtagacgcctccacctccagacgcttcaccccaccctccaccgccctctcccccggcaaaatgagcgaagccctccccctcggcgcccccgacgccggcgcagcactcgcaggcaaactccgctcaggcgaccgctccatggttgaagtcctcgccgaccatcccggcgaactcgtgcgaaccgactcccccaacttcctatgctctgtcctccccacacactggcgctgtaacaagacactccccatcgccttcaaagtagtcgcgctaggagacgtcccagacggtaccctcgtcactgtaatggcaggcaacgacgaaaactactcagccgaactacgtaacgccacagccgcaatgaaaaaccaagtcgcccgctttaacgacctccgattcgtaggccgctccggccgcggcaaatcattcaccctcactataaccgtcttcaccaacccaccccaagtcgccacataccatcgcgccatcaaaataaccgtagacggcccacgcgagccccgccgccaccgccaaaaactcgacgatcaaacaaaacccggctcactctccttctctgaacgcctatcagaactcgaacaactccgccgcacagccatgcgcgtctccccacaccacccagcccccactccaaacccccgtgcatctctcaaccactcaacagcctttaacccccaaccccaaagccaaatgcaagacacacgccaaatccaaccatctcccccatggtcctacgaccaatcctaccaatacctcggctccatcgcctccccctccgtacacccagctacccccatctcacccggccgcgcctccggcatgaccaccctctccgccgaactctcctcacgcctctctacagcccccgacctaacagccttcagcgacccacgccaattccctgccctcccatccatcagcgaccctcgtatgcactacccgggcgccttcacttattctcccaccccagttacctctggcatcggcataggcatgtcagccatgggatctgccacccgataccacacctacctgcccccaccctatcccggctccagccaggcccaaggtggtcccttccaagcctcttcgccctcataccacctctactacggtgcctctgccggaagctaccagttctccatggtcggtggcgaaagatcacccccacgtatcctcccaccctgcacaaacgcatcgacaggctttgcactcctcaacccatccctccccaaccaatcggacgtcgtcgaagccgaaggctcccattccaactcacccaccaacatggccccctcagcccgccttgaagaagccgtatggcgcccatactaa

SEQ ID NO: 763 - RNA, 1170 nt, synthetic construct
  misc_feature 1..1170: note = Homo sapiens__H9KVB1__RUNX1 CDS opt11
  source 1..1170: mol_type = other RNA
atgcgcatccccgtcgacgccagcacttcccgccgattcaccccaccctccaccgcactctctcccggaaaaatgtcagaagccctccccctcggagctcccgacgccggcgccgccctcgcaggaaaactccgatccggtgaccgctccatggtcgaagtccttgccgaccaccccggcgaactcgtccgaaccgactcccccaacttcctctgctcagtcctccccacccactggcgttgcaacaaaaccctccccatcgccttcaaagtcgtagccctcggagatgtcccagacggcacactcgtcaccgtcatggccggcaacgacgaaaactattcagccgaactccgtaacgccaccgccgccatgaaaaaccaagtcgcacgcttcaacgatctccgcttcgtcggccgctctggacgcggaaaatcattcacactaaccatcaccgtcttcaccaacccaccccaagtagcaacctaccaccgagcaatcaaaataacagtcgacggaccccgcgaaccccgaaacacccgccaaatacaaccctccccaccctggtcctatgaccaatcatatcaatacctcggctcgatcgcctccccatccgtccacccagctaccccaattagcccaggccgcgcctcaggcatgaccacactctccgccgaactatcctccagactctccaccgcccccgacctcacagcattctccgacccccgacaattccctgccctaccatccatatccgatccccgaatgcactaccccggtgccttcacatactccccaacaccagtaacctccggtataggaattggaatgtcagccatgggctccgcaacccgctaccacacctacctacccccaccctaccccggatcctcacaagcacaaggcggccccttccaagcatcctccccctcataccatctctactacggcgcaagcgccggatcctaccaattcagcatggtaggaggagaacgatcaccaccccgcatcctccctccctgcaccaacgcctcaaccggctccgccctcctcaacccctccctccccaaccaatcagacgtcgttgaagccgagggctcacactcaaactcccccaccaacatggccccatccgcccgccttgaagaagccgtctggcgcccttactaa

SEQ ID NO: 764 - RNA, 1047 nt, synthetic construct
  misc_feature 1..1047: note = Homo sapiens__Q01196-11__RUNX1 CDS opt11
  source 1..1047: mol_type = other RNA
atggccggcaacgacgaaaactactccgctgaactccgcaatgccaccgccgccatgaaaaaccaagtcgcccgcttcaacgaccttcgtttcgtaggccgctccggccgaggcaaatctttcacactcacaattaccgtcttcacaaaccctccccaagtcgccacctaccaccgcgctatcaagatcaccgtcgacggcccccgagaaccccgccgccaccgccaaaaactagacgatcaaaccaaaccaggttccctctccttctcagaacgactttctgaactagaacaactacgtcgaactgccatgcgcgtatcccctcaccaccccgcccccacccccaacccccgtgcctccctcaaccactccacagccttcaacccccaaccccaatcccaaatgcaagacacccgacaaatccaaccctccccaccctggtcctacgatcaatcataccaatacctcggctcaatcgcctcaccctctgttcatcccgccacccccatctcacccggacgcgcctccggcatgaccactctctccgccgaactctcctcccgcctctccaccgcccccgacctcaccgcattctcagacccccgacaattccccgccctcccctccatctcagacccccgtatgcactatcccggagccttcacatactcccccacccccgtcacctccggcatcggcattggcatgtctgccatgggctccgccacccgataccacacatacctcccaccaccctaccccggctcctctcaagctcaaggcggccccttccaagcctcctcaccctcttaccacctctactacggcgcctccgccggctcataccaattctccatggtcggaggagaacgctcacctccccgaatcctcccaccctgcaccaacgcctctacaggctcagcactcctcaacccctccctccccaaccaatcagacgtcgtcgaagccgaaggatcccactccaactcacccaccaacatggccccctcagcccgactcgaagaagccgtctggcgcccctactaa

SEQ ID NO: 765 - RNA, 774 nt, synthetic construct
  misc_feature 1..774: note = Homo sapiens__Q01196-4__RUNX1 CDS opt11
  source 1..774: mol_type = other RNA
atgcgcatacccgtcgacgcctccacatcacgccgcttcacccctccctccaccgccctctcacccggcaaaatgtccgaagcactccccctcggcgcccccgacgccggcgccgccctcgccggcaaactccgctccggcgaccgctcaatggtcgaagtcctagccgaccaccccggcgaactcgtccgcaccgactcccccaacttcctatgctcagtactccccacccactggcgctgcaacaaaaccctacccatcgcctttaaagtcgtcgccctaggcgacgtccccgacggcaccctagtcacagtaatggccggcaacgacgaaaactactcagccgaactccgcaacgccacagccgcaatgaaaaaccaagtagcccgcttcaacgacctccgcttcgtaggccgctccggcagaggcaaatccttcaccctcaccatcaccgtcttcaccaacccaccccaagttgccacctaccaccgcgccatcaaaatcacagtcgacggcccacgagaaccccgacgccaccgccaaaaactcgacgaccaaaccaaacccggctcactctctttctcagaacgcctatccgaactagaacaactacgccgaaccgccatgcgcgtctcaccccaccacccagcccccacacccaacccacgcgcctccctcaaccactccaccgccttcaacccccaaccccaatcacaaatgcaagacacccgacaaatccaaccctctcctccctggtcctacgaccaatcataa

SEQ ID NO: 766 - RNA, 771 nt, synthetic construct
  misc_feature 1..771: note = Homo sapiens__A8MZI9__RUNX1 CDS opt11
  source 1..771: mol_type = other RNA
atgcccgcagcaccccgcggccccgcccaaggagaagccgccgcacgcacccgatcacgagacgcctccaccagccgtcgcttcaccccaccctcaaccgccctctcccccggcaaaatgtcagaagccctaccactaggcgccccagacgccggcgccgccctcgccggcaaattacgctcaggcgaccgctctatggtcgaagtcctcgccgaccacccaggagaactcgtccgcaccgactcccccaacttcctatgctccgtcctacccacccactggcgctgcaacaaaacactacccatagccttcaaagtcgtcgccctcggcgacgtacccgacggcaccctcgtcaccgtaatggccggcaacgacgaaaactactccgccgaactccgaaacgccaccgccgccatgaaaaaccaagtcgccagattcaacgacctccgcttcgtcggcagatccggcagaggcaaatccttcacactcaccatcacagtcttcaccaaccctccccaagtagccacctaccaccgcgccatcaaaatcaccgtcgacggcccccgagaaccacgccgccaccgccaaaaactcgacgaccaaaccaaacccggctccctatcattctccgaacgactctccgaactcgaacaactccgccgcaccgccatgcgagtctccccacaccaccccgcacccacccccaacccccgagcctcactcaaccactcaaccgccttcaacccccaaccccaatcacaaatgcagtaa

SEQ ID NO: 767 - RNA, 753 nt, synthetic construct
  misc_feature 1..753: note = Homo sapiens__Q01196-3__RUNX1 CDS opt11
  source 1..753: mol_type = other RNA
atgcgcatccccgtagacgcatcaacctcacgcagattcaccccaccctcaaccgccctctcaccaggcaaaatgtccgaagccctccccctcggcgcccccgacgccggcgcagccctcgccggcaaactaagatccggcgaccgctcaatggtcgaagtcctcgccgaccaccccggcgaactcgtccgcaccgactcccccaacttcctatgctctgtcctccccacccactggcgctgcaacaaaaccctccccatcgcattcaaagtagtcgccctcggcgacgtccccgacggcaccctcgtcaccgtcatggcaggcaacgacgaaaactactccgccgaactacgcaacgccacagccgccatgaaaaaccaagtcgcccgattcaacgacctacgcttcgtcggccgctccggccgcggcaaatccttcaccctcacaatcaccgtcttcaccaacccaccacaagttgccacctaccaccgagccatcaaaatcacagtcgacggcccacgcgaaccccgtcgccaccgccaaaaactagacgaccaaactaaacccggatccctatccttctccgaacgcctctcagaactcgaacaactccgacgtaccgccatgcgcgtctcaccccaccaccccgcccccacccccaacccccgagcctccctcaaccactccaccgccttcaacccccaaccccaatcccaaatgcaagaagaagacacagcaccatggcgctgctaa

SEQ ID NO: 768 - RNA, 729 nt, synthetic construct
  misc_feature 1..729: note = Homo sapiens__Q01196-7__RUNX1 CDS opt11
  source 1..729: mol_type = other RNA
atgcgcatccccgtcgacgcctccacctcccgacgcttcaccccaccctcaaccgccctctcacccgggaaaatgtccgaagccctacccctaggcgcccccgacgccggcgccgcactcgccggcaaactccgctccggcgaccgctccatggtggaagtcctcgccgaccaccccggcgaactcgtccgaacagactcccccaacttcctctgctccgtcctacccacccactggcgctgtaacaaaaccctccccatcgcctttaaagtcgtcgcactcggcgacgtccccgacggcaccctcgtcaccgtcatggccggcaacgacgaaaactactccgccgaactccgcaacgctacagccgccatgaaaaaccaagtcgcccgcttcaacgacctccgcttcgtcgacggcccccgagaaccccgccgccacagacaaaaactagacgaccaaaccaaacccggctccctatccttctccgaacgactctccgagctagaacaactacgccgcaccgcaatgcgcgtctcaccccaccaccccgcccccacccccaacccacgcgcctccctcaaccactccaccgccttcaacccccaaccccaatcacaaatgcaagacacccgccaaatccaaccctccccaccctggtcctacgaccaatcctaccaatacctaggctccatcgcctccccctcagtccaccccgccacccccatctaa

SEQ ID NO: 769 - RNA, 675 nt, synthetic construct
  misc_feature 1..675: note = Homo sapiens__Q01196-5__RUNX1 CDS opt11
  source 1..675: mol_type = other RNA
atgcgcatccccgtcgacgcctccacctcccgccgcttcacccccccctccacagccctctcccccggcaaaatgtctgaagccctccccctcggcgcccccgacgccggagccgccctcgcaggcaaactccgatcaggcgaccgctccatggtcgaagtcctcgccgaccaccccggcgaactcgtccgcaccgactcccccaacttcctctgctccgtcctcccaacccactggcgctgcaacaaaaccctccccattgccttcaaagtcgtcgccctcggagacgtcccagacggcaccctcgtaaccgtcatggcaggaaacgacgaaaactactcagccgaactacgcaacgccaccgccgcaatgaaaaaccaagtcgcacgcttcaacgacctacgattcgtcggacgctcaggccgcggcaaatccttcaccctcaccatcacagtcttcaccaaccccccccaagtagccacctaccaccgcgccatcaaaatcacagtcgacggcccccgcgaaccccgctccaaatgcatacacctcggcctagtacaccccccaggctggtacaccctccaagcaggcatcctccgcgaccacgtatcagactccctaggctcaacattcccccccggcggctggcaagcccccgtcaaacccaaatcctaa

SEQ ID NO: 770 - RNA, 567 nt, synthetic construct
  misc_feature 1..567: note = Homo sapiens__Q01196-6__RUNX1 CDS opt11
  source 1..567: mol_type = other RNA
atgcgcatccccgtcgacgcctccacctcccgccgcttcacccccccatccaccgccctctcccccggcaaaatgagcgaagccctccccctcggcgcccccgacgccggcgccgcactcgccggcaaactccgctccggagaccgatccatggtcgaagtcctcgccgaccaccccggcgaactcgtacgcacagactcccccaacttcctctgctccgtcctccccacacactggcgctgcaacaaaacactccccatagccttcaaagtcgtcgccctcggcgacgtccccgacggcacactcgtcaccgtaatggccggcaacgacgaaaactactccgccgaactccgcaacgccaccgccgccatgaaaaaccaagtcgcccgcttcaacgacctcagattcgtcggccggtccggacgcggcaaatcattcaccctaaccatcacagtcttcaccaaccccccccaagtcgccacctaccaccgcgccatcaaaatcaccgtcgacggcccccgcgaaccccgcaactccctcacctggccccgctacccccacatctaa

SEQ ID NO: 771 - RNA, 384 nt, synthetic construct
  misc_feature 1..384: note = Homo sapiens__Q01196-1__RUNX1(1-128) CDS opt11
  source 1..384: mol_type = other RNA
atgcgcatccccgtagacgcctccacctcccgccgcttcacccccccctccaccgccctctcacccggcaaaatgtccgaagccctccccctaggcgcccccgacgccggcgccgccctcgccggcaaactccgatccggcgaccgctccatggtcgaagtcctcgccgaccaccccggcgaactcgtccgcacagactcccccaacttcctctgctccgtcctccccacccactggcgctgcaacaaaaccctccccatcgccttcaaagtcgtcgccctcggcgacgtccccgacggcaccctcgtcaccgtcatggccggcaacgacgaaaactactccgccgaactccgcaacgccaccgccgccatgaaaaaccaagtc

SEQ ID NO: 772 - RNA, 531 nt, synthetic construct
  misc_feature 1..531: note = Homo sapiens__Q01196-1__RUNX1(1-177) CDS opt11
  source 1..531: mol_type = other RNA
atgcgcatccccgtcgacgcatccacctcccgacgcttcacccccccctccaccgcactctcacccggcaaaatgtcagaagccctccccctcggcgcacccgacgccggagccgccctagcaggcaaactccgcagcggcgaccgctccatggtcgaagtcctagccgaccacccaggcgaactcgtccgcacagactcacccaacttcctatgctccgtcctccccacccactggcgctgcaacaaaaccctacccatcgccttcaaagtcgtcgccctcggcgacgtccccgacggcaccctcgtcaccgtcatggccggcaacgacgaaaactactcagccgaactccgcaacgccaccgccgccatgaaaaaccaagtcgcccgcttcaacgacctccgattcgtcggccgcagcggccgcggcaaatcattcaccctcaccatcaccgtcttcacaaaccccccccaagtagccacataccaccgcgccatcaaaatcacagtcgacggcccccgcgaaccccgc

SEQ ID NO: 773 - RNA, 723 nt, synthetic construct
  misc_feature 1..723: note = Homo sapiens__Q01196-1__RUNX1(1-241) CDS opt11
  source 1..723: mol_type = other RNA
atgcgcatccccgtcgacgcctccacctcccgccgcttcaccccaccctccaccgcactatcacccggcaaaatgtccgaagccctccccctcggagcccccgacgccggcgcagccctcgccggcaaactccgctccggagacagatcaatggtcgaagtcctagcagaccaccccggagaactcgtacgcaccgactcccccaacttcctatgctccgtcctacccacccactggcgatgcaacaaaacactaccaatcgccttcaaagtcgtcgccctaggagacgtccccgacggcaccctcgtcaccgtaatggcaggcaacgacgaaaactactccgccgaactccgcaacgccaccgccgccatgaaaaaccaagtagcccgattcaacgacctccgattcgtcggccgatcaggccgcggaaaatcattcaccctcaccatcaccgtcttcaccaacccaccccaagtagccacctaccaccgcgccatcaaaatcaccgtcgacggcccccgcgaaccccgccgccaccgccaaaaactagacgaccaaacaaaacccggctccctctccttctccgaacgcctctcagaactcgaacaactacgacgcaccgccatgcgcgtctcaccccaccaccccgcccccacccccaacccccgcgcctccctaaaccactcaaccgccttcaacccccaaccccaatcccaaatgcaa

SEQ ID NO: 774 - RNA, 1815 nt, synthetic construct
  misc_feature 1..1815: note = Homo sapiens__Q06455-1__RUNX1T1a CDS opt11
  source 1..1815: mol_type = other RNA
atgatctcagtcaaacgcaacacctggcgcgccctctccctcgtcattggcgactgccgaaagaaaggcaacttcgaatactgccaagaccgcacagaaaaacactccacaatgcctgactcgcctgtcgacgtaaaaacacaatcacgcctaacaccacccacaatgcccccaccacccacaacacaaggcgcccccagaacctcctcattcacacccacaacccttaccaacggcacaagccactcccccacagcactaaacggagcaccctccccaccaaacggattctccaacggcccatcctcatcatcctcctcctcactcgcaaaccaacaactgcccccagcctgtggcgctcgccaattatccaaactcaaacgcttcctaactacactccagcaattcggcaacgacatctccccagaaataggcgaacgtgtccgcacccttgtgctcggcctagtcaactctactttaacaatagaagagttccactcaaaactacaagaagctaccaattttcccctccgacctttcgtcattcccttcctcaaagccaacctccccctcctccaacgggaactcctccattgcgcacgcctcgccaaacagaacccagcccaatacctcgcacagcacgaacaactattactcgacgcatcaacaacctcacccgtcgactcatcagaactactcctagacgtcaacgaaaacggcaaacgccgaacccccgaccgaaccaaagaaaacggcttcgaccgcgaaccactccactcagaacatccaagcaagcgaccctgcactatatcacccggccaaagatattctcccaacaacggcctctcataccaacctaacggtctcccccacccaactccccctcccccacaacactaccgcctcgacgacatggcgatcgcacaccactacagagactcctaccggcacccctcacaccgagacctacgagaccgcaaccgccccatgggcctccacggcacccgccaggaagaaatgatcgaccacagactcacagaccgcgaatgggccgaagaatggaaacacctagaccacctcctcaactgcataatggacatggtcgagaaaactcgccgcagcctaactgtccttcgacgatgccaagaagccgaccgtgaagaactcaactactggatccgccgctactcggacgccgaagacctcaagaaaggcggcggatcttcatcctcccatagccgccaacaatcacccgtcaaccccgacccggtagccctcgacgcccaccgagagttcctacaccgccccgccagcggatacgtcccagaagaaatatggaagaaagctgaagaagccgtcaacgaagtaaaacgacaagccatgaccgaacttcaaaaagcggtttcagaagccgaacgcaaagcccatgacatgatcaccacggaacgcgccaaaatggaacgtaccgtcgccgaagccaaacgccaagccgccgaagacgcactcgccgtaatcaaccaacaagaagactcatccgaatcatgctggaactgcggccgtaaagccagcgaaacctgctccggttgcaacacagcccgctactgcggatcattctgccaacacaaagactgggaaaaacaccatcatatatgcggacaaaccctccaagcccaacaacaaggcgacacccccgccgttagctcatcggttacccccaactctggagctggcagccccatggacaccccacccgccgccacgccccgatccactacacccggcacaccctccaccatagaaaccacccctcgatag

SEQ ID NO: 775 - RNA, 1992 nt, synthetic construct
  misc_feature 1..1992: note = Homo sapiens__A0A0A0MSU1__RUNX1T1a CDS opt11
  source 1..1992: mol_type = other RNA
atgtgccatcccgacaaagccttcacatcagacaaactccaatgcgtcttcaacgaatataaagctgcagtctgggtacccccacgcccccgtcccctatcccgcgcaccgctccccgaagcaggcggcgaaaacctccacctaaaaatctcacgcgtcaggaaacgcaacctaccattcgtcgtctggggcgaggaagaagcaagcacaccagggcttgacgccatctcccaccacctctgctacccagacagaacccaccgcgaccgcaccgaaaaacactccacaatgccggactccccagtagacgtcaaaacacaatcccgcctcaccccacccactatgcccccaccacccaccactcaaggcgcaccccgcacatccagtttcacacccacaaccctaacaaacggaacatcacactcccccaccgcactcaatggagcaccctctccacccaatggcttcagcaacggtccctcatcatcctcatcctcttcactcgcaaatcaacaattacccccagcatgtggagcgcgccagctatccaaactaaaacgcttcttaacaacattacaacaattcggaaatgacatctcccccgaaatcggcgaacgtgtccgaaccctagtcctaggtctagtcaactcaaccctgaccatagaagagttccactcaaaattacaagaagcaaccaacttccccctccgacccttcgtgattcccttcctaaaagcaaatttacccctcctacagcgcgaactcctacactgtgctcgtctagcaaaacaaaaccctgcacaatatcttgcccaacacgaacaactcctactcgacgcctcaacaacctcccccgttgactcctcggaactgctactcgacgtcaacgagaatggcaaacgacgcacacccgaccgcaccaaagaaaacggattcgatcgtgaaccactccactccgaacacccaagcaagcggccatgcacgatctcacccggccaacggtactcaccaaataacggactctcctaccaacccaacggtctcccccatccaacaccccctcccccacaacactaccgcctagacgacatggccatagctcatcactacagagattcctaccgccacccctctcaccgcgacctacgcgaccgaaaccgccccatgggactccatggaacccgccaagaagaaatgatcgaccacagactcactgaccgcgaatgggcggaagaatggaagcacctagaccacctcctcaactgcataatggacatggtcgagaaaacccgcagatcactaaccgtactacgccgatgccaagaagcagaccgcgaagaactcaactactggatccgccgttactccgacgccgaagacctcaagaaaggaggaggttcatcatcgtcacactcacgccaacagagcccagtcaatccagacccagtcgccctagacgcacaccgcgagttccttcatcggcccgcatcaggctacgtacccgaagaaatctggaagaaagccgaagaagccgtaaatgaagtcaaacgccaagccatgaccgaacttcaaaaagccgtttccgaagcagaacgcaaagcccacgacatgatcaccacagaacgagccaaaatggaacgtaccgtcgcagaagccaaacgccaagcggccgaagacgccctcgccgtcataaaccaacaagaagactcctcagaatcctgctggaactgcggccgaaaagcctccgaaacttgctctggatgcaacaccgcccgatactgcggctcattctgccaacacaaagactgggaaaaacaccaccacatctgcggccaaacactgcaagcccagcagcaaggtgacacccccgccgtatcctcatccgttacaccaaacagcggagcaggatcacccatggacacgccacccgccgctacaccccgctccaccacccccggcaccccaagcactatagaaacaaccccacgctaa

SEQ ID NO: 776 - RNA, 1848 nt, synthetic construct
  misc_feature 1..1848: note = Homo sapiens__Q06455-3__RUNX1T1a CDS opt11
  source 1..1848: mol_type = other RNA
atgtgccacccagataaagcctttacctcagacaaactccagtgcgtattcaacgaatataaggccgcagtttgggtccctccaaggccaagaccattatcacgcgcaccactcccagaagaccgcaccgaaaaacactcaaccatgccagacagccccgtcgatgtcaaaacccagtcacgactcaccccaccaaccatgccaccaccacccaccacccaaggcgcaccccgaacctcatctttcacccccaccacactaacaaatggcacatcacacagccccacagccctcaacggagccccatctccacccaacggattttccaacggaccctcctcatcctcctcctcctcccttgccaaccaacaactacccccagcctgcggcgcaagacaactctccaaactcaagcgcttcctcaccacactacaacaatttggcaatgatatatcccctgaaatcggcgaacgcgtccgtaccctcgtccttggcctagtaaattcaaccctcacgatagaagagttccactccaaactccaagaggccacaaacttccctctccgcccatttgtcatacccttcctcaaagccaacctccccttgctacaacgcgaactcctccactgcgcacgtctcgccaaacaaaaccccgcacagtacttagcccaacacgaacaactgttactcgacgcttccaccacatctcccgtagactcatcagaactcctactagacgtcaacgaaaatggaaaacgccgaaccccagaccgcaccaaagaaaacggctttgaccgcgagcccctgcactccgagcacccctccaagagaccatgcaccatcagccccggacaaagatacagccccaacaacggcctctcctaccagcccaacggcctcccccaccccacacccccacctccccaacactatagacttgacgacatggccatcgcacaccactaccgtgactcttaccgccacccctcccaccgcgacttacgcgaccgcaaccgacccatgggcctccacggaacccgacaggaagaaatgattgaccatcgcctcaccgaccgcgaatgggcagaagaatggaaacacctggaccacctcctcaactgcatcatggacatggtcgagaaaacccgacgttctctcaccgtactccgacgctgccaagaagcagaccgcgaggaactcaactactggatccgcagatactccgacgcagaggacctcaagaaaggaggcggctcctcctcatcacactcccgtcaacaatcccccgtcaacccggaccccgtcgccctcgacgcacatcgagagttcctacaccgcccagcctccggctacgtaccagaagaaatctggaagaaagcagaagaagccgtcaacgaagtcaaacgacaagcaatgactgaactccaaaaagcagtatccgaagcagaacgcaaagctcacgatatgataaccacagaacgcgccaaaatggaaaggaccgtagcagaagccaaacgacaagccgccgaagacgccctcgccgtcataaaccaacaagaagactcctccgaatcatgctggaactgcggccgaaaagcctctgaaacatgctctggctgtaacacagccagatactgcggatcattctgccaacacaaagactgggaaaaacatcaccatatctgcggccaaacactacaagctcaacaacaaggcgacaccccagctgtctcatcctcagtcaccccaaacagcggcgccggctcaccaatggacacacccccagcagccacgccccgcagcaccacccccggcacccccagcactatcgaaaccaccccgcgataa

SEQ ID NO: 777 - RNA, 1755 nt, synthetic construct
  misc_feature 1..1755: note = Homo sapiens__A0A087WWT6__RUNX1T1a CDS opt11
  source 1..1755: mol_type = other RNA
atggtcggcctaagcggccctgtccaataccgcacagaaaaacactcaactatgcccgactcaccagtcgacgtaaaaacacaatcccgcctaacgcccccaaccatgccacccccgccaactacacaaggagcccccagaacatcatcatttacacccaccacacttaccaacggcacctcccattcccccaccgccctcaacggcgcaccgtcgccacccaacgggttctccaacggcccgagcagttcctcctcatctagcctcgcaaaccaacaactcccaccagcctgcggcgcaagacaactatccaaactcaaaagattcctcacaacactacaacaattcggaaacgacatctcccccgaaatcggcgaaagagtacgaaccctagtcctcggccttgtcaactcaacacttaccattgaagaatttcactccaaactccaagaagccaccaacttccccctcaggcccttcgtaatacctttcctcaaagccaacctcccactactacaacgcgaactcttgcactgcgcccgactagcaaaacaaaacccagctcaatacctagcacagcacgaacaactactactcgacgcttccacgaccagccccgtcgacagctccgagctcctattagacgtcaatgaaaacggcaaacgccgaaccccagaccgcaccaaagaaaacggattcgaccgtgaacctctccactccgaacacccatcaaaacgaccctgcacaatatccccgggccaaagatactcccccaacaacggcctcagctaccaaccaaacggtctcccccacccgacacccccacccccacaacactaccgactggacgacatggctatcgcccaccactacagagactcataccgccatccctcccacagagacctacgagaccgcaaccgccccatgggcctccacggaacaagacaagaagaaatgatcgaccaccgcctcacagaccgagaatgggccgaagaatggaaacacctcgaccacctcctcaactgcataatggatatggtcgagaaaacaagacgttctctaaccgtcctacgtagatgccaagaagcagaccgcgaagaactaaactactggatccgccgctactcagacgccgaagacctcaagaaaggaggcggatcctcctccagccattcccgacaacaatcccccgtcaacccggaccccgtagcactcgacgcacaccgcgagttcctccaccgcccagcctccggatacgtccccgaagaaatctggaagaaagccgaagaagcagtcaacgaagtcaaacgccaagcaatgaccgaactacaaaaagcagtatccgaagcagaacgtaaagcccacgacatgattaccacagaacgcgccaaaatggaacgcaccgtcgccgaagctaaaagacaagccgccgaagacgcactcgccgttatcaaccaacaagaagactcctccgaatcatgctggaactgcggccgtaaagcatccgaaacatgctccggctgcaacaccgctcgctactgcggctccttctgtcaacacaaagactgggaaaaacaccaccacatctgcggccaaactctccaagcccaacaacaaggagacaccccagccgtctcatcctccgtaacccccaattcaggcgcgggcagtccaatggacacaccaccagccgctaccccacgttccaccaccccaggcacaccatcaacaatcgaaaccaccccacgctaa

SEQ ID NO: 778 - RNA, 1734 nt, synthetic construct
  misc_feature 1..1734: note = Homo sapiens__Q06455-2__RUNX1T1a CDS opt11
  source 1..1734: mol_type = other RNA
atgccagaccgaaccgaaaagcactccaccatgcccgactcaccagtagacgtaaaaacccaaagccgcttaaccccacccaccatgcccccaccacccacaacacaaggcgcaccccgaacatcctcattcacacccaccaccctaaccaacggcaccagccactcaccaaccgccctcaacggcgccccctcaccacccaacggcttctccaacggcccctccagctcctcctcctcctccctcgcaaatcaacaactgcccccagcatgcggcgcccgacaactctccaaactaaaacgtttcctaacaaccctccaacaattcggcaacgacatttcacccgaaatcggagaacgcgtccgaaccttagtcctcggcctagtcaactccacactgacaatcgaagagttccactccaagctacaagaagcaacaaacttcccactacgcccctttgtcattccattcctcaaagccaatctccccttactacaaagagaactcctccactgtgcccgcttggccaaacaaaacccagcacaatacctcgcccaacacgaacaactcctactagacgcctccacaacatctccggtagactccagcgaactcctccttgacgtcaacgaaaacggcaaacgccgaacaccagaccgcacaaaagaaaacggattcgatcgagagcccctacactcagaacacccatcaaaaaggccctgcaccatctcacccggccaacgctactcacccaacaacggactatcctaccaacccaacggtctccctcaccccacaccaccgccaccccaacactaccgactagacgacatggcaatagcccaccattaccgagactcctaccgccacccctcccaccgcgacctccgtgaccgaaaccgccccatgggcctacatggaacccgccaggaagaaatgatagaccaccggctcacagaccgcgaatgggcagaagaatggaaacacctagaccacctactcaactgcatcatggatatggtcgagaaaacaagacgctcattaaccgtcctgcgccgatgccaagaagcagaccgagaggaactcaattactggatccgccgctactccgacgccgaagatctcaagaaaggcggaggatcctcatccagccactcgcgtcaacaatcccccgtcaaccctgaccccgtcgcactagacgcacacagagagttcctccaccgacccgcctctggctacgtacctgaagaaatctggaagaaagccgaagaagcagtcaacgaagtcaaacgccaagctatgacagaactccaaaaagccgtctccgaagcagaaagaaaagcccacgacatgatcaccaccgaacgcgccaaaatggagcgaaccgtagccgaagccaaacgacaagcagcagaagacgctctcgccgtcatcaaccagcaagaagactcctccgaatcctgctggaactgcggccgcaaagcatctgaaacctgctcaggctgcaacacggctcgatactgcggcagcttctgccaacacaaagattgggaaaaacaccatcacatttgcggccaaacactacaagcccaacaacaaggagataccccagccgtctcctcatcagtaacccctaactcaggcgccggatcccccatggacacaccacccgcagccacaccccgctcaaccacacccggcaccccaagcacaatcgaaacaaccccacgataa

SEQ ID NO: 779 - RNA, 1704 nt, synthetic construct
  misc_feature 1..1704: note = Homo sapiens__Q06455-4__RUNX1T1a CDS opt11
  source 1..1704: mol_type = other RNA
atgcccgactcccccgtagacgtaaaaacccaatcgaggctgacacccccaaccatgccccctcctcccaccacccaaggcgctccccgaacctcatccttcacccccaccacccttacaaacggcacctcacactcccccacagccctcaatggagccccctcaccacccaacggcttctcaaacggaccctcatcatccagttcctcctccctcgcaaaccaacaactcccacccgcctgcggcgcaagacaactcagcaaactcaaacggttcctaacaacactacaacaattcgggaacgacatctcacccgaaataggcgaacgcgtgcgcacactcgtactaggcctcgtcaactccacattaaccattgaagagttccactccaaactccaagaagccactaacttccccctccgacccttcgtcatcccctttctaaaagccaacctccccctgctacaacgcgaactcctacactgcgcccgcctcgctaaacaaaaccccgcccaatacctcgcccaacacgaacaacttctcctagatgcctctacaacctcccccgtcgactcctccgaactactcctagacgtcaacgaaaacggaaaacgacgaacacccgaccgcacaaaagaaaacggcttcgaccgagagcccctccattccgaacacccctccaaacgcccctgcaccatctcccccggccaacgctactccccaaacaacggcctctcctaccaacctaacggcctcccccacccaaccccaccgccaccccaacactaccgactcgacgacatggcgatcgcacaccactaccgagacagctaccgccacccctcccaccgtgacttacgcgaccgtaatcgtcccatgggtctccacggcacacgccaagaagaaatgatcgaccacagactcaccgaccgagaatgggctgaagaatggaaacacctcgaccacctcctcaattgcataatggatatggtagagaaaacccgccgctcactaaccgtcctccgccgctgccaagaagcagaccgcgaagaactcaattattggatccgacgctactctgatgccgaagacctcaagaaaggcggcggttcatctagctctcactcccgccaacaatcacccgtcaaccccgaccccgtcgcactcgacgcccaccgcgagttccttcacagacccgcatccggctacgtcccagaagaaatctggaagaaagccgaagaagccgtcaatgaagttaaacgccaagcaatgacagaactacaaaaagccgtctcagaagccgaacgaaaagcacacgacatgatcaccacagaacgtgccaaaatggaacgaacagtagccgaagccaaacgacaagccgccgaagacgcactcgcagtcataaaccaacaagaggactcctccgaaagctgttggaactgcggccgcaaagcatccgaaacctgttccggctgcaacaccgctagatactgcggctccttctgccaacacaaagactgggaaaaacaccatcatatctgcggtcaaactctccaggcacaacaacaaggagacactccagccgtgtccagctccgtgacccctaacagcggcgcaggatcccccatggacacaccaccagccgcaactccccgctccaccacgccaggaaccccctccaccatagaaactacaccccgctaa

SEQ ID NO: 780 - RNA, 1284 nt, synthetic construct
  misc_feature 1..1284: note = Homo sapiens__Q06455-5__RUNX1T1a CDS opt11
  source 1..1284: mol_type = other RNA
atgatctcggttaaacgcaacacctggcgtgcactctccctagtcataggagactgccgaaaaaaaggaaacttcgaatactgtcaggaccgcacagaaaaacactcgacaatgcccgacagcccagtagacgtaaaaacccaatcacgcctcaccccccctaccatgccccccccccccaccacacaaggcgccccacgcacttcctcattcacccccaccaccctcacgaacggcacctcccactcccccaccgcactaaacggagccccttcccccccaaacggcttcagcaacggaccgtcctcatcctccagcagctcactagccaaccaacaactcccccccgcctgcggcgcccgccagctctccaaactaaaacgcttcctcaccacactacaacaattcggcaacgacatctccccagaaataggcgaacgcgtccgcaccttagtccttggacttgtaaattccaccctaacaatcgaagaattccactcaaaactccaagaagccaccaactttcccctccgcccgttcgtcatacccttcctaaaagccaacctcccacttctccaaagagaactcctccactgcgcccgcctcgcaaaacaaaaccccgcccaatacctcgcccaacacgaacaactcctcctcgacgcctctaccacctcccctgtcgacagctccgaactcctcctagacgttaacgaaaacggaaaacgacgcacccccgaccgaaccaaagaaaacggcttcgacagagagcccctacactccgaacacccctcaaaacgaccctgcaccatatcccccggccaacgatactcccccaacaacggtctctcctaccaacccaatggattaccccacccaacccccccccccccacaacactaccgtctcgatgacatggctatagcccaccactaccgagactcatacagacacccttcccaccgcgacctacgcgaccgcaaccgtcccatgggcctccacggcacgcgacaagaagagatgatagaccaccgcctcaccgaccgagaatgggccgaagaatggaaacacctagatcacctcctaaactgcatcatggacatggtcgagaaaacccgccgttcactcaccgttctccgacgatgccaagaagccgaccgagaagaattaaactactggatccgccgctactcagacgccgaagacctcaaaaaaggcggtggctcctcctcatcccactcccgccaacaatcccccgtcaaccccgacccagtcgccctcggataa

SEQ ID NO: 781 - RNA, 1203 nt, synthetic construct
  misc_feature 1..1203: note = Homo sapiens__Q06455-6__RUNX1T1a CDS opt11
  source 1..1203: mol_type = other RNA
atgcccgaccgaaccgaaaaacactccacaatgcccgactcccccgtcgatgtcaaaacccaatcacgactaacccccccaaccatgccccccccccccacaacccaaggcgccccccgcaccagctccttcaccccaacaacccttacaaacggcacctcacactcccccaccgccctaaacggagctccctcccccccaaacggcttctcaaacgggccctcatcaagctcatcctcctcgctcgcaaaccaacaactgccccccgcgtgcggagcacgccaactatccaaactaaaacgcttcctaacaacactccaacaattcggcaatgacatcagcccagaaataggcgaacgcgtaagaaccctcgtcctcggactcgtaaactccaccctcaccattgaagaattccactccaaactccaagaagccaccaacttccctctccgccccttcgtcatccccttcctcaaagccaacctacccctcctccagcgcgaactccttcactgcgcacgcttagccaaacaaaaccccgcccaatacctagcacaacacgaacaactactcctcgacgcatcgacaacctccccagtcgactcctccgaactccttctagacgttaacgaaaacggcaaacgccgcacccccgaccgcacaaaagaaaacggcttcgaccgcgaaccattacactcagaacacccttccaaacgcccttgcaccatatccccaggacaacgctactcacccaacaatggactaagctaccaaccaaacggcctcccccaccccacccccccccccccccaacactaccgtctcgacgacatggctattgcacaccactaccgcgactcctaccgacacccatcacacagagacctccgagacagaaaccgaccaatgggcctacacggcacacgtcaggaagaaatgatcgaccaccgactcaccgaccgcgaatgggcagaagaatggaaacacctcgaccacctcctcaactgcataatggacatggtagaaaaaaccagacgctccctcacagtcctacgacgatgccaagaagcagaccgagaagaactaaactactggatccgccgatactccgacgccgaagacctcaaaaaaggcggcggctcctcctcctcccactctcgccaacaatcgccggtcaaccccgaccccgtcgccctaggctaa

SEQ ID NO: 782 - RNA, 1722 nt, synthetic construct
  misc_feature 1..1722: note = Homo sapiens__Q06455-1__RUNX1T1a(31-604) CDS opt11
  source 1..1722: mol_type = other RNA
cgaaccgaaaaacactccacaatgcctgattccccagtcgacgtcaaaacacaatcacgcctaacccctccaacaatgccacccccaccaacaacacaaggcgcccccagaacatcatcttttactcccacaacactcaccaacggcacctcacactcacccaccgcgttaaacggcgccccatcacccccaaacggcttctccaacggtccttcctcctcctcatcctcctccctcgctaatcaacaactccctccagcctgcggcgcccgacaactaagcaaactaaaacgatttctcacaaccctacaacaatttggaaacgacatctccccagaaatcggagaacgagtccgcaccctcgtcctcggcctagtcaactccacactaacaatagaagagttccactccaaactccaagaagccaccaacttccctctacgccccttcgtcatcccctttctaaaagctaaccttccacttctccaacgagaactactccactgtgcacgactggccaaacaaaaccccgcccagtacctcgcacagcacgaacaactcctcctcgacgcctccaccacctcacccgtagactccagcgaactcctcctcgacgtcaatgaaaacggaaaacgccgcacacccgaccgaactaaagaaaacggattcgaccgagaacccctacacagcgaacacccatccaaacgcccctgcaccatctcacccggccaacgatactcccccaacaacggcctatcataccaaccaaacggcctaccacaccctacacccccacccccacaacactaccgcctcgacgacatggccatagcccaccactaccgagacagttaccgacacccctcccaccgcgaccttcgcgaccgcaaccgccccatgggcctacacggcacccgccaggaagaaatgatagaccatcgcctaaccgaccgcgaatgggccgaagaatggaaacacttggaccacctcctcaactgcataatggacatggtcgagaaaacacggcgatcactcacagtgctacgacgatgccaagaagcggaccgcgaagaactcaactactggatccgacggtactccgacgccgaagaccttaaaaagggcggtggctcctcaagctcgcactcccgacaacaaagccccgtcaacccagacccagtcgccctcgacgcccaccgtgagttcctccaccgacccgcctccggctacgtaccggaagaaatctggaagaaagccgaagaagccgtaaacgaagtaaaaagacaggccatgactgaactacaaaaagcagtatccgaagcagaacggaaagcacacgacatgataaccacggaaagagccaaaatggaacgaaccgtcgcagaagccaaaagacaagcagcagaagatgccctcgcagtaatcaaccaacaagaagacagctctgaaagctgctggaactgcggacgcaaagcctcagagacctgctcaggctgcaacaccgcaagatactgcggctccttctgccaacataaagactgggagaaacaccatcacatctgcggacaaaccctccaagcacaacaacaaggcgacaccccagcagtcagctcgtccgtcaccccaaacagcggcgccggctctcccatggacaccccacccgccgccacaccccgctcaaccacccccggcaccccctccaccatcgagaccacaccacga

SEQ ID NO: 783 - RNA, 1815 nt, synthetic construct
  misc_feature 1..1815: note = Homo sapiens__O43439-1__RUNX1T1b CDS opt11
  source 1..1815: mol_type = other RNA
atggccaaagaatcgggtatcagcctcaaagaaatacaagtactcgcccgacaatggaaagttggaccagaaaaacgcgtcccagccatgcctggctccccggttgaagtcaagatacagtcccgctcctccccacccaccatgcccccgctcccacccatcaaccccgggggcccccgaccagtctccttcacacccactgccctctcaaacggaatcaaccactcaccacccaccctaaacggagccccgtcaccaccccaacgcttctccaatggacccgccagctccacttccagcgccctcacaaaccaacaactcccagcaacctgcggcgccagacaactctcgaaacttaaacgtttcctcaccaccctacaacaattcggcaacgacatctcaccagaaatcggcgaaaaggtccgaacccttgtcctcgccctggtcaacagcacagtcaccatagaagagttccactgcaaactccaagaagcgaccaacttccccctacgccccttcgtcatcccattcctcaaagccaacttaccccttcttcagcgagaactactacactgcgcccgcgcagccaaacaaacgccctcacaatacctcgcccaacacgagcacctactcctcaacacctccatagcatcacccgccgactcatcagagctattaatggaagtccacggcaacggcaagcgaccttcccccgagcgccgagaagaaaactcatttgaccgcgacacaatagcccccgaacccccagccaaacgcgtctgcaccatctcaccagccccacgccactctcccgcactcaccgtacccctcatgaaccccggaggccaattccaccccacaccaccaccactccaacactacaccctcgaggacatcgcaacctcacacttatacagagaacccaacaaaatgctcgaacaccgcgaagtccgagacagacaccactcccttggcctcaatggaggataccaagacgaactggtcgaccaccgcttaaccgaacgcgaatgggccgacgaatggaaacacctagaccacgcattaaactgcataatggaaatggtcgagaaaacacgccgctcaatggccgtcctccgaagatgccaggaatcagatagggaagaactgaactactggaaaagacgatacaacgaaaacacagaactccgaaaaaccggcaccgaactcgtctcccgccaacacagccccggctcagcagactcactctccaatgactcgcaacgggagttcaacagccgccccggcaccggctacgtacccgtcgagttctggaagaaaaccgaagaagcagtcaacaaagtaaaaatccaagccatgtccgaagtacaaaaagcagtagccgaagcagaacaaaaagccttcgaagtcatcgcaaccgaacgggctcgcatggaacaaaccatcgccgatgtaaaaagacaagccgccgaagacgcatttcttgtgatcaacgaacaagaagaatccactgaaaactgctggaactgcggacgaaaagcctccgaaacttgctccggctgtaacatcgcccgatactgcggctccttctgccagcacaaagactgggaacggcaccaccgcctctgcggccagaaccttcacggccaatctccccacggtcaaggccgcccgctactacccgtcggacgaggttcctccgcccgctccgccgactgctccgtcccctcaccagcactcgacaaaacctcggccaccacatcccgctcaagcacgcccgcctccgtaaccgcaatcgataccaacggcctttaa

SEQ ID NO: 784 - RNA, 1845 nt, synthetic construct
  misc_feature 1..1845: note = Homo sapiens__O43439-4__RUNX1T1b CDS opt11
  source 1..1845: mol_type = other RNA
atgggcttccaccacgtcggacaagcacgcctagaactccttacatccggagacctccctgccctggcctcacaaagagccggcatcaccgtaggtcccgaaaaacgtgtacccgcaatgccgggaagcccagtcgaagtcaaaatacaaagccgttcctccccgcccaccatgccacccctcccacccatcaaccccggcgggccccgacccgtctctttcactcccaccgcactatcaaacggcatcaaccactcaccccctaccctaaacggcgcaccctccccgccacaacgcttctccaacggacccgcatcatcaaccagcagcgcactaacaaaccaacaactaccagccacatgcggcgcacgacaactctcaaaactcaaacgcttccttacaaccctacaacaattcggcaacgacatctcaccagaaatcggcgagaaagtaagaaccctcgtactcgccctagtcaactccaccgtcaccatcgaagagttccactgcaaactacaagaagcaacgaacttcccgctccgccccttcgtcatacccttcctgaaagctaacctgccactcctccaacgagaacttctacactgtgcccgcgcagctaaacaaaccccctcacaatacctcgcccaacacgaacacctcctcctaaacacctcaattgcctcaccagcagactcctccgaactactcatggaagtccacggtaacggcaaaagaccatccccagaacgtcgcgaagaaaactcgttcgaccgagacaccattgcccccgaaccacccgccaagagagtctgcacaatatcccccgccccaagacatagcccagccctgactgttcccctcatgaaccccggcggccaattccaccccacacccccacccctccaacattacacactcgaagacatagccacgtcacacctctaccgagaacccaacaagatgctcgaacatcgagaagtacgagaccgccaccactcactaggactcaacggaggatatcaagacgaactcgtagaccaccggctaaccgaacgagaatgggccgacgaatggaagcacctcgaccacgcactaaactgcataatggaaatggttgagaaaacacgacgttctatggccgtcctgcgtcgctgccaggaatccgaccgtgaagaactcaactactggaaacgacgctacaacgaaaacactgaactccgcaaaacaggcacagaactcgtctcccgccagcactccccaggaagtgccgactccctctccaacgactcccaacgtgagttcaactcccgtcccggaactggctacgtccccgtcgagttctggaagaaaaccgaagaagcagtaaacaaagtcaaaatacaagccatgagcgaagtccaaaaagccgtcgccgaagccgaacaaaaagccttcgaagtcatcgcaacagaaagggcccgaatggaacaaaccattgctgacgtcaaaagacaagccgccgaagacgccttcctcgtcatcaacgaacaagaagaatcaacagaaaactgttggaactgcggccgcaaagcctcagaaacctgctccggatgcaacatcgcccgctactgcggatcattctgccaacacaaagactgggaacgccaccaccgcctctgcggccaaaacctccacggacaatccccacatggacaaggaagacccctacttcccgtcggccgcggcagctccgcccgatccgccgactgctcggtcccatctcccgcgctcgacaaaacgagcgccacaacctcacgctcctctaccccagcatccgtcacagctatagacaccaacggtctctag

SEQ ID NO: 785 - RNA, 1788 nt, synthetic construct
  misc_feature 1..1788: note = Homo sapiens__O43439-5__RUNX1T1b CDS opt11
  source 1..1788: mol_type = other RNA
atggtcggcgtgcccggcgccgccgccttccaactcggtccagaaaaacgcgtaccagcaatgcccggttctcccgtagaagtaaaaatccaatcccgctcatcaccacccactatgcctccactcccacccataaaccccggaggcccacgccctgttagcttcacccccaccgccctatccaacggcatcaatcactcccccccaacactaaacggcgccccatctcccccccaacgcttctccaacggcccagcctcgtccacctcctctgccctcaccaaccaacaactcccagctacatgcggagcacgtcaactctctaaactgaaacgattcctaaccaccctccaacaatttggaaacgacatcagccccgaaatcggagaaaaagtgcgcaccctcgtcttagccctagtcaattccacagtcactatagaagaattccactgcaaactccaagaggccacaaacttcccccttcgaccattcgtcatcccattcctaaaagccaacctgcccctcctacaacgcgaactcctacactgcgcccgagcagccaaacaaacaccctcacaatatcttgcccaacacgaacacctactactcaacacctccatcgcctcccccgccgattcctccgaactcctaatggaagtccacggcaacggcaaacgcccctcgcctgaacgtcgagaagaaaattcattcgaccgcgacaccatagcacccgaaccacctgccaaacgcgtatgtaccatcagccccgcaccacgccactcccccgcactcaccgtacccctcatgaaccccggcggccaattccaccctacacccccccccctccaacactacacactagaagacatcgcaacctcccacctctaccgcgaacccaacaaaatgctcgaacaccgagaagtaagggaccgccaccactcactcggcctaaacggcggataccaagacgaactagtagaccaccgtttgaccgaaagagaatgggcagacgaatggaaacacctcgatcacgccctaaactgcatcatggaaatggtagaaaaaacccgacgctccatggcagtcctacgacgatgccaagaatccgaccgcgaagagctaaactactggaaacgtcgctacaacgaaaacacagaactcagaaaaaccggcaccgaactcgtatcacgacagcactccccaggatcggccgactccttatccaacgactcccaacgagaatttaactctcgccctggcacaggttacgtaccagtcgaattctggaaaaaaaccgaagaggcagtcaacaaagtaaaaatccaagccatgtccgaagtacaaaaagccgtcgcagaagcagaacaaaaagcattcgaggtcatcgccacagaacgagcacgcatggagcaaaccatcgcagacgtcaaacgacaagctgcagaagacgctttcctcgtcatcaacgaacaagaagagtccacggagaactgctggaactgtggacgaaaagcatctgaaacctgctccggctgcaacatcgccagatactgcggaagcttctgccaacacaaagactgggaacgccaccaccgcctctgcggccaaaacctacacggacaatctccccacggccaaggacgcccactactccctgtcggacgagggtcctcagcacgatctgcagactgctccgtcccctcaccagctctcgacaaaacctccgccaccacctcccgatcaagcacccccgcatcagtaacagccatcgacaccaacggactctaa

SEQ ID NO: 786 - RNA, 1728 nt, synthetic construct
  misc_feature 1..1728: note = Homo sapiens__O43439-2__RUNX1T1b CDS opt11
  source 1..1728: mol_type = other RNA
atgccaggctcccctgtagaagtcaaaatccaaagcagatcctcaccacccaccatgccccctctgcccccaatcaacccaggcggaccccgaccagtatctttcacacccaccgcactatcgaacggaatcaaccactctcccccaaccctaaatggagccccctccccaccccaacgcttctccaacggcccagcctcgtcaacctcatccgccctcacaaaccaacaactccccgcaacctgcggagctcgtcaactctcaaagctaaaacgtttcctcaccaccttgcaacagttcggaaacgacatctcccccgaaatcggcgaaaaggtccgcaccctcgtcctcgccctagtgaactcgaccgttacaatcgaagagttccactgcaaacttcaagaagccaccaacttccccctacgacccttcgtcattccatttctaaaagctaacctacccctcctacaacgcgaactcctccactgcgcccgagccgcaaaacaaacaccctcccaatacctagcccaacacgaacatctactcctcaacacctccatcgcctccccggccgactccagcgaactcctcatggaagtccacggcaacggcaaacgcccctcccccgaacgccgcgaagaaaactccttcgaccgagacacaatagcccccgaaccacccgcaaaacgagtatgcaccatttcaccggcaccccgacactcacccgccctaaccgtcccactcatgaaccccggtggccagttccaccctacacccccgcccctccaacactacaccctcgaagacattgcaacctcacacctctaccgcgaacccaacaaaatgctagaacaccgcgaagtccgagaccgacaccactcactcggattaaacggcggctatcaagacgaactcgtcgaccaccgccttaccgaaagagaatgggccgacgaatggaaacatctcgaccacgcactaaactgtataatggagatggtagaaaagacaagacgatctatggcagtcctccgccgatgccaggaatccgacagagaagaactcaactactggaaacgacgctataacgaaaacaccgagctcagaaaaacaggaaccgaactcgtatcccgccaacacagcccgggttccgcagactccctctccaatgactctcaacgagaatttaactcacgccccggaaccggctacgttcccgtcgagttctggaagaaaaccgaagaagccgtcaacaaggtcaaaatccaagccatgtccgaggtccaaaaagcagttgcagaagcagaacaaaaagcatttgaagttattgctacagagagagcacgtatggaacaaacaatagccgacgtaaaacggcaagccgcagaagacgcattcctcgtaatcaacgaacaggaagaaagcaccgaaaactgctggaactgcggccgcaaagcctccgaaacatgctcaggatgcaatatcgcacgatactgcggctcattctgccaacataaagactgggaaagacaccatcgcctctgcggccaaaacctacacggccaatctccacacggccaaggccgccccctcctaccagtcggccgcggcagctccgcgcgttcagccgactgctccgtcccctcaccggcactagacaaaacctccgccacaacatcccgctcctcaacccccgcctcagtcacggcaatcgacacaaacggcttataa

SEQ ID NO: 787 - RNA, 48 nt, synthetic construct
  misc_feature 1..48: note = Homo sapiens____RUNX1T1b(short) CDS opt11
  source 1..48: mol_type = other RNA
gaagtgggcttttgccatgtcgcgcaagtgggcttgaaattgctcggg

SEQ ID NO: 788 - RNA, 1749 nt, synthetic construct
  misc_feature 1..1749: note = Homo sapiens__O43439-1__RUNX1T1b(22-604) CDS opt11
  source 1..1749: mol_type = other RNA
ggacccgaaaaacgcgtaccagcaatgcccggctcacccgtcgaagtcaagatccaatcccgctcctcaccacccaccatgccacccctaccacccatcaaccccggaggcccccgacccgtcagcttcacacccaccgcactctccaacggcatcaaccacagtcctcccacgctaaacggagccccctcacccccacaacgcttctcaaacggcccagcaagctccacctcctccgccctaacaaaccaacaactccccgcaacctgcggcgcacgtcagctatcaaaacttaaacgattcctcaccaccctccagcaattcggaaatgacatatcacccgaaatcggcgaaaaagtaagaaccctcgtactagccctcgtcaactcaaccgtcacaatagaagagttccactgcaaactacaagaagccaccaacttccctcttcgtccctttgtaataccattcctaaaagcaaacctcccactactacaacgcgaacttttacactgcgcgcgtgcagccaaacaaacaccctcacaataccttgcccaacacgaacacctactgcttaacacatccatagcatcccccgccgactcatcagaactcctcatggaagtacacggcaacggaaaacgcccctcccccgaacgccgcgaagagaactccttcgaccgcgacacaatcgcccccgaaccacccgccaaacgcgtatgcacaatatcccccgccccacgccacagccccgccctcaccgtcccactaatgaaccccggaggccaattccaccccaccccaccgcccctacaacattacacactagaagacatcgcaacatcccatctctatcgcgaacccaacaaaatgctcgagcatagggaagtccgagaccgccaccactccctcggactcaacggtggataccaagacgaactggtcgaccaccgactcacagaacgcgaatgggccgacgagtggaaacacctagaccacgcccttaactgtatcatggaaatggtcgagaaaacacgaagatccatggcagtcctaaggcgctgccaagaatcggaccgtgaagaactcaactattggaaacgcagatacaacgaaaacacagaactccgaaaaacaggtaccgaactcgtaagccggcaacacagtcccggctccgctgactccctctccaacgactcccaaagagagttcaactcccgacccggcacgggatacgtccccgtagagttctggaagaaaaccgaagaagcagtcaacaaagtaaaaatccaagcaatgtccgaagtccaaaaagcagtcgcggaagccgaacaaaaagccttcgaggtcatagcaaccgaaagagccagaatggaacaaaccatcgcagacgtcaaaagacaagccgccgaagacgcctttctagtaataaacgaacaggaagaaagtaccgaaaactgctggaactgcggccgcaaggcaagcgaaacatgctccggatgcaacatcgcacgctactgcggcagcttctgccagcataaagactgggaacgccaccacagattatgcggacaaaacctacatggacaaagcccccatggacaaggccgacccctcctccccgtaggacgcggctcctcggcacgctcagccgactgctcagtaccctcgccagcacttgacaaaacctcagccaccaccagtcggtcaagcactccagccagcgtcaccgccatagacaccaacggactc

SEQ ID NO: 789 - RNA, 1836 nt, synthetic construct
  misc_feature 1..1836: note = Homo sapiens____CBFbeta(1-165)_SMMHC(1527-1972) CDS opt11
  source 1..1836: mol_type = other RNA
atgccaagggtggtgcccgaccagagaagcaagttcgaaaatgaggaatttttccggaagctgagcagggaatgcgagataaaatacacgggcttccgagacagaccacacgaagagaggcaagcgaggttccaaaacgcctgcagagacggaagaagcgagatagcgttcgtggccacggggacgaacctgagcctacagttcttccctgcaagctggcaaggagaacagaggcagacaccgagtagggagtacgtggacctggagagggaggcggggaaggtgtacctgaaggcaccaatgatactaaatggagtatgtgtaatctggaagggatggatagacctgcaacggctggacgggatgggatgcctggagttcgacgaggaaagagcgcagcaagaggacgcgctggcacaacaggcgttcgaggaagcaaggaggcggacgcgagagttcgaggacagggataggagccacagagaggagatggaggtacacgagctagagaaaagcaagagggcgctggaaacacaaatggaggagatgaagacacagctggaggagttggaagacgaactgcaagcgacagaggacgcaaagctgaggctggaagtcaacatgcaggcattaaagggacagttcgagagagacctgcaggcaagagacgagcagaacgaggaaaagaggaggcagctccaaaggcagctgcacgagtacgaaacggaactggaggacgagcgaaagcagagggcgctagcagcagcagcaaagaaaaagctggagggggacctgaaggacctggagttgcaggcagacagcgcaataaaagggagggaagaggcgatcaagcaactaagaaagctgcaggcacaaatgaaggatttccagagagagctagaggatgcaagggcaagccgggacgagatattcgcgacggcaaaagaaaacgagaaaaaggcgaaaagcctagaagcagacctgatgcagctacaggaggatttggcggcggcggagagggcaaggaaacaggcagatctggagaaggaggagctggcggaagagttggcaagtagcctaagcggaaggaatgcgctgcaggacgaaaagcggagactcgaggcgagaatagcacagctagaggaggaactggaggaggagcagggaaacatggaagcgatgagcgacagagtgagaaaggcgacgcaacaggcggaacagctaagcaacgagttagcaacggagagaagtacagcccaaaagaatgaaagtgcaaggcaacagctagagaggcagaacaaggaactgaggagcaagctgcacgagatggaaggagcagtgaaaagcaaattcaaaagcaccatcgcggcgctggaagcgaagatagcgcagctggaggagcaggtagaacaagaggcaagagagaagcaagcggcgacaaagagtctaaagcagaaagacaagaaactgaaagagatactgttacaagtggaggacgaaaggaagatggcagagcaatacaaggagcaggcggaaaaggggaacgcgagggtgaaacagttaaagaggcaactggaggaggcggaggaagagagccaaagaataaacgccaacagaaggaaactacagcgggaattggacgaggcaacagagagtaacgaagccatggggcgagaagtgaacgcactaaagagcaaactgaggcgggggaacgagacgagtttcgtaccgagcaggcggagcggagggagaagggtgatagagaatgcagacggcagcgaagaggaaacggacacgagagacgcagacttcaacgggacgaaggcgagcgaatag

SEQ ID NO: 790 - RNA, 1551 nt, synthetic construct
  misc_feature 1..1551: note = Artificial____CBFbeta(1-165)_SMMHC(1527-1877) CDS opt11
  source 1..1551: mol_type = other RNA
atgccgagggtggtgccagaccaaaggagcaagttcgagaacgaggaatttttcagaaagctgagcagagagtgcgagataaagtacacggggtttagagacagaccacacgaggagaggcaggcaaggttccagaacgcatgcagagacgggagaagcgagatagcattcgtagcgacaggaacaaacctaagcctacaatttttcccggcgagctggcagggagagcagagacagacgccaagcagggagtacgtggacctagagagggaagcaggaaaggtgtacctaaaggcaccaatgatactaaatggggtgtgcgtaatatggaaggggtggatagacctacagagactggacgggatgggatgcttggagttcgacgaagagagagcgcaacaggaggacgcactggcacaacaagcattcgaagaggcaaggaggaggacgagagagttcgaggacagagacaggagtcacagggaggaaatggaggtacacgaactagagaaaagcaagagggcgctggagacacagatggaagagatgaaaacgcaactggaggagctggaagacgagctgcaggcaacagaagatgcgaagctaaggctggaggtgaacatgcaggcactgaaaggacagttcgaaagggacctgcaggcgagggacgaacagaacgaggaaaagaggaggcagctccagaggcagctacacgagtacgagacggagttggaagacgagagaaagcaaagagcactagcggcggcggcgaagaaaaagctagagggagacctcaaagatctggagctacaggcagacagcgcgataaagggcagggaggaagcgataaagcagctaaggaagctgcaggcacagatgaaggacttccagagggagctcgaggacgcaagagcgagccgggacgagatattcgccacggcaaaggagaacgaaaagaaggcgaaaagcctggaggcggacctaatgcaactgcaagaagacctggcagcggcagagcgagcgaggaagcaggcagacctagagaaggaggagctggcggaagaactggcgagtagcctgagcggaaggaacgcactgcaggacgagaagaggaggctagaggcaagaatagcgcagctggaggaggagttggaggaggagcaggggaacatggaggcgatgagcgacagagtgagaaaggcgacacagcaagcagagcagttaagcaacgagctggcaacagagagaagcacggcgcaaaagaacgaatcagcgaggcaacagttggagaggcagaacaaggaactaagaagcaagctgcacgagatggagggcgcggtaaagagcaaattcaagtcaacaatagcggcgcttgaggcaaagatagcacagctggaagaacaagtagaacaggaggcgagagagaaacaagcagcgacaaagagcctgaaacagaaggacaagaagttaaaggagatactgctacaggtagaggacgaaagaaaaatggcggaacagtacaaagagcaggcagaaaaggggaacgcataa

SEQ ID NO: 791 - RNA, 612 nt, synthetic construct
  misc_feature 1..612: note = Artificial____CBFbeta(1-165)_Linker_Lifeact CDS opt11
  source 1..612: mol_type = other RNA
atgccgcgcgtggtcccggaccagcgctcgaaatttgaaaatgaagagttctttcgcaagctctcgcgagagtgcgagataaagtacacgggctttcgcgatagaccgcacgaggaaaggcaagcgcgctttcaaaatgcctgtagagatggcaggagcgagatcgcgttcgtggccacgggcacgaacttgagcctgcaatttttcccggcctcgtggcagggcgagcagaggcaaacgccctcgcgcgagtacgtggacttggaaagggaagcgggcaaggtgtatctaaaggccccgatgatactaaatggagtgtgcgtgatctggaaagggtggatagacctgcaaaggctcgatggaatgggctgtctagagttcgatgaggaacgcgcgcaacaggaagacgcattggcacagcaagcgttcgaggaagcacgcaggagaacgcgcgagttcgaggacagggacaggagccatcgcgaggaaatggaagggggctcgggagggagcgggggctctggcgggagcgggggaggaggcgtggccgatctcatcaaaaagttcgagagcataagcaaagaagagggcgatcccccggtagcgacatag

SEQ ID NO: 792 - RNA, 579 nt, synthetic construct
  misc_feature 1..579: note = Artificial____CBFbeta(1-165)_HIF1alpha(549-575) CDS opt11
  source 1..579: mol_type = other RNA
atgccgcgcgtggtcccggaccagcgctcgaaatttgaaaatgaagagttctttcgaaagctctcgcgcgagtgcgagatcaaatacacgggcttccgcgatcgcccgcacgaggaaaggcaagcgcgctttcaaaatgcctgtcgcgatggcaggagcgagatcgcgttcgtggccacgggcacgaacctgagcctgcaatttttcccggcctcgtggcagggcgagcaaaggcaaacgccctcgcgcgagtacgtggacttggaaagggaagcgggcaaggtctatctcaaggccccgatgatactcaatggcgtgtgcgtgatctggaaagggtggatagacttgcaaaggctcgatggcatgggctgtctcgagttcgacgaggaacgcgcgcaacaggaagatgccctggcccagcaagcgttcgaggaagcgcgcaggcgcacgcgcgagttcgaggacagagacaggagccaccgagaggaaatggaaccgttctcgacccaggacacggacctggacttggaaatgctcgcgccctatatcccgatggatgacgatttccagctcaggtaa

SEQ ID NO: 793 - RNA, 624 nt, synthetic construct
  misc_feature 1..624: note Artificial____CBFbeta(1-165)_Linker_HIF1alpha(549-575) CDS opt11
  source 1..624: mol_type = other RNA
atgccgcgcgtggtcccggaccagcgctcgaaatttgaaaatgaagagttctttcgaaagctatcgcgagagtgcgagatcaagtacacgggattccgcgatcgaccgcacgaggaaagacaagcgcgatttcaaaatgcatgtcgcgatggcaggagcgagatagcgttcgtggccacgggcacaaacttgagcttgcaattcttcccggcatcatggcagggcgagcaaaggcaaacaccctcgcgcgagtacgtggacttggaaagggaagcgggcaaggtctacctaaaggccccgatgatactcaatggagtgtgcgtgatctggaaagggtggatagacttacaaaggctcgatggcatgggatgtctcgagttcgatgaggaacgcgcgcaacaggaagatgccttggcacagcaagcgttcgaggaagcgcgcaggcgaacgcgcgagttcgaagacagagacaggagccatcgagaggaaatggaaggaggatcgggcggaagcgggggctcgggcgggagcgggggcggaccatttagcacgcaagataccgatctagatctcgagatgttggccccgtacatacccatggacgatgactttcaattgcgctag

SEQ ID NO: 794 - RNA, 2259 nt, synthetic construct
  misc_feature 1..2259: note = Artificial____RUNX1(1-177)_N_RUNX1T1a(31-604) CDS opt11
  source 1..2259: mol_type = other RNA
atgcgcataccagtagatgcctccacctctcgccgcttcacacctccctcgacagccctcagccccggaaaaatgtccgaagcgctcccacttggcgcacccgacgcaggcgctgccctcgccggaaaactccgtagtggtgaccgctctatggtggaagtcttagccgaccaccccggagaactcgtaagaacagactccccaaacttcctctgctccgtgctacctacacactggcgctgcaacaaaaccctcccgattgccttcaaagtcgtagccctaggcgacgtccccgacggaaccctcgtcaccgtcatggcaggcaatgatgaaaactactccgcagaactccgcaacgccaccgctgcaatgaaaaaccaagtcgcacgattcaatgacctcagattcgtagggcgctccggccgagggaaatcattcaccctcacaatcacagtcttcaccaaccctccacaagtcgcaacataccaccgcgccatcaaaatcacagtcgacggaccccgagaaccccgcaatagaactgagaaacacagcaccatgcccgattcgccagtcgatgtcaaaacccaatcaaggctcaccccgcccacaatgcccccacccccaaccacacagggcgcaccccgcacctcttcattcacccctacaacactaacaaatggcacatcccacagtccaaccgcccttaatggcgccccatccccaccaaacggtttctccaacggcccctcctcttcatcatcatcctccctggctaaccaacaactcccacccgcatgcggagcacgacaactcagcaaactaaaacgattcctcaccactcttcaacaattcggcaacgacatatccccagaaataggcgaacgagtccgaaccctagtcctcggtctagtcaattccacgctcactatagaggagttccactccaaactacaagaagctaccaacttcccactccgaccattcgtcattccattcctcaaggcaaacctccctctgctccaacgtgaactcctacactgcgccagactcgccaagcaaaaccccgcacaatatcttgcccaacacgaacaacttctcttagacgcctccaccacatctcccgtcgactcatctgaacttctcctagatgttaacgaaaacggcaaacgcagaactcccgaccgcaccaaagaaaacgggttcgatagagaaccactacacagcgaacacccctctaaacgcccatgcaccatatctcctggccaacggtactcacctaacaacggtctctcataccaacccaatggcctcccacaccccaccccaccacccccacaacactaccgacttgacgacatggcgatcgcacaccactacagagactcttataggcacccatcccaccgcgatctccgcgaccgcaatcgccccatgggactacacggcactcgccaagaagaaatgatcgaccaccgactaaccgaccgtgaatgggcagaagaatggaaacacctcgaccacctcctaaattgcatcatggacatggtcgagaaaacaaggcgctcactcacggttctccgtcgctgccaagaagcagatcgtgaagaactgaactattggattcgacgatactcagacgccgaagacctcaagaaaggcggaggctcatctagctcccatagtcgccaacaatcacccgtaaacccggacccagtagccctcgacgctcaccgagagttcctacaccgtcccgcctccggatacgtacccgaagaaatatggaagaaagctgaagaagcagtaaacgaagtcaaacgccaagctatgaccgaactacaaaaagccgtaagcgaagctgaacgcaaagcacacgacatgatcactaccgaacgcgcaaaaatggaacgaaccgtcgcagaagccaaacgccaggccgccgaagacgcccttgctgtcataaatcagcaagaagactcctccgaatcctgctggaactgtggccgcaaagccagcgaaacctgctccggttgcaataccgcccgctactgcggttcattctgccagcacaaagactgggaaaaacaccaccacatctgcggtcaaaccctgcaagctcaacaacaaggcgacacccctgccgtctcatccagcgtaacccccaacagcggcgccggctccccaatggacaccccacccgcagccacaccccgatcaacaacacccggaacaccctcgactatcgaaaccacaccccgttag

SEQ ID NO: 795 - RNA, 774 nt, synthetic construct
  misc_feature 1..774: note = Artificial____RUNX1(1-241)_RUNX1T1b(short) CDS opt11
  source 1..774: mol_type = other RNA
atgcgcatcccagtcgacgcctccacctcccgccgcttcaccccaccctcaacagcactctcacccggcaaaatgtcagaagcactccctctcggagcacccgacgccggcgccgccctcgccggcaaactccgctcaggcgaccgatcaatggtcgaagtcctagccgaccaccccggagaactcgtccgcaccgactcacccaacttcctctgctccgtcctacccacccactggcgctgcaacaaaaccctccccatcgccttcaaagtcgtcgcactaggcgacgtcccagacggcaccctcgtcaccgtcatggccggcaacgacgaaaactactccgccgaactccgcaacgccacagcagccatgaaaaaccaagtcgcccgcttcaacgacctccgcttcgtaggccgctccggccgcggcaaatccttcaccctaaccatcacagtattcaccaatccaccccaagtcgccacctaccaccgcgctatcaaaatcaccgtcgacggcccccgcgaaccccgccgccaccgacaaaaactcgacgaccaaaccaaacccggctcactctccttctccgaacgcctctccgaactcgaacaactccgccgaacagccatgcgcgtctcaccccaccaccccgcccccacccccaacccccgagcctccctcaaccactcaaccgccttcaacccccaaccacaatcccaaatgcaagaagtcggcttctgccacgtagcccaagtcggtctcaaactcctcggctaa

SEQ ID NO: 796 - RNA, 2478 nt, synthetic construct
  misc_feature 1..2478: note = Artificial____RUNX1(1-241)_V_RUNX1T1b(22-604) CDS opt11
  source 1..2478: mol_type = other RNA
atgcgcatccccgtggacgcctcaacaagccgacgcttcacgcccccatccaccgccctatcccccggcaaaatgtcagaagccctccccctcggagccccagacgcaggggccgcactcgcaggcaaacttcgatccggggacaggagcatggtcgaagtcctagccgaccaccccggagagctagtccgaaccgactcccccaacttcctgtgctccgtactgccaacccactggcgatgtaacaaaacactccctatagcttttaaagtagtggccctaggagacgttccagacggcaccctcgtcaccgtcatggccggcaacgacgaaaactacagcgccgaactacgcaacgcaactgccgccatgaaaaatcaagtggccagattcaacgacctccgcttcgtcggccgcagcggaagaggaaaatcgttcaccttaaccatcacagttttcacaaacccaccccaggttgcaacatatcaccgagccatcaaaatcactgttgacggcccacgtgaaccaagacggcatcgtcaaaaactagacgaccaaacaaaaccaggttcactctcattttcagaacgcctctcagaactcgaacaactacgacgaaccgctatgcgcgtctcaccccaccaccccgccccgaccccgaacccacgagcatctctgaaccacagcacagccttcaacccacaaccacagtcccaaatgcaagttggacccgagaaacgagtcccagctatgccgggcagccccgtcgaggtcaaaatccaatcgcgcagcagccctcccacaatgcccccactaccacccatcaacccaggcggtccccgccccgtctcattcaccccaacagccctctcaaatggaatcaaccacagccctcccaccctcaacggtgccccctccccaccacaacgcttttcaaacggaccagcgtcctccacctccagcgctctcactaaccaacaactcccagcaacttgcggagccagacaactcagcaaactaaaaagattcctcaccaccctacaacagttcggaaacgacatctcccccgaaataggcgagaaagttcgcactcttgtactagcccttgtaaactccacagtaactatcgaagagttccactgcaaactacaagaagcaaccaacttcccactccgccccttcgtgatcccattcctaaaagcaaacctaccactactccaacgcgaactgctccactgcgcccgtgccgcaaaacagactccctcacaatacctcgcccaacatgaacatcttctcctcaacacatcaattgctagcccagcagactcatccgaacttctcatggaagtccacggaaacggtaaacgaccatctcccgaacgacgcgaagaaaactccttcgaccgcgacaccatcgcccccgaaccacccgccaaacgcgtatgcacaatatcaccggccccgcgccactcccctgcacttaccgtaccccttatgaacccagggggccaattccaccctacacccccacccctgcagcactacactctagaagacattgcaacaagccacctataccgagaacctaacaaaatgctagaacacagagaagtgcgtgaccgccaccacagcctcggcttaaacgggggctaccaagacgaactcgttgatcaccgcctcaccgaacgagagtgggcagatgaatggaaacacctggaccacgccctaaactgcatcatggaaatggtcgagaaaaccagacgatcaatggccgtcctaagaaggtgccaagaatcagacagagaagaactcaactattggaaacgacgatataacgaaaacaccgaactcagaaaaacaggcactgaactcgtctcgagacaacactcaccaggctctgcagactctctttccaacgactcacaacgcgagttcaatagccgaccaggcaccggctacgtccccgtcgaattttggaagaaaaccgaagaagccgtaaacaaagtcaaaatacaagcaatgtccgaagtccaaaaagccgtcgccgaagcagaacaaaaagccttcgaggttatcgcgaccgaacgcgcccgtatggaacagacaatagccgacgtcaaacgacaggctgccgaagacgctttcctcgttatcaacgaacaagaagaatcaactgaaaactgctggaactgcggccggaaagcgtccgaaacctgctcaggctgcaacatcgctcgttattgcggctccttttgccaacataaagactgggagcgccaccaccgcctatgcggccaaaacctacacggccaaagcccccacggacaaggccgacctctcctacccgtaggccgaggctcctccgcacgctccgccgactgcagcgtccccagccccgcactcgacaaaacttcggcaaccacatcccgcagcagcacccccgcgagcgttacagccatcgacacaaacggactataa

SEQ ID NO: 797 - RNA, 2478 nt, synthetic construct
  misc_feature 1..2478: note = Artificial____RUNX1(1-241)_I_RUNX1T1b(22-604) CDS opt11
  source 1..2478: mol_type = other RNA
atgaggatacccgtcgacgcctccacgtcacgccgcttcacacccccaagcaccgccctatcacccggcaaaatgtccgaagctctaccactaggtgcgccagacgcaggcgctgctctcgccggaaaactacgatccggggaccgatccatggtcgaagtcctcgctgatcaccccggcgaacttgtccgcacagactccccaaacttcctctgctccgtactcccgactcactggcgttgcaacaaaacacttcctattgcgttcaaggtcgtagccctaggggacgtccccgacggcaccttagtcacagtcatggcgggtaacgacgagaactactcagccgaattacgcaacgctacagcagccatgaaaaaccaggtagctcgcttcaacgacctccggttcgtcggtagaagcggccgaggaaaatcttttaccctcacaatcaccgtgttcaccaacccaccccaagtcgccacctaccaccgggcaatcaaaatcacagttgacggaccccgcgagccccgacgccatcgccaaaaacttgacgaccaaaccaaaccaggatcactatccttctcagagcgactctcagaactcgaacaattacgccggaccgcaatgcgtgtctcaccccaccacccggcccccacgcccaacccccgcgcctcactcaaccactccactgctttcaacccgcaaccccaatcccaaatgcagatcggcccagaaaaacgcgttcccgccatgccaggaagtcccgtcgaagtcaaaatccaatccagatcttccccaccaaccatgcctcccctcccgcccataaacccgggaggtccccgacccgtgtccttcacccccaccgccctctcgaacggcatcaaccactcaccacctaccctaaacggagcaccatccccaccccaacgcttctcaaacggacctgcatcctccacatcgtccgccctcaccaaccaacaactcccagccacatgcggcgcccgtcaactatctaagctaaaacgcttcctaaccactctccagcaatttggcaacgacatatcccccgaaatcggcgaaaaagtccgcacactcgtcttagccctcgtcaattccaccgtcaccatagaagagttccactgcaaactccaagaagccacaaacttcccactccgtccctttgtcatcccattcttaaaggcgaacctaccactactccaaagagaactactccactgcgctcgggccgcaaaacaaacccctagccagtacctagcccaacacgaacatctactactcaacactagcatcgcctcacccgcagactcatctgaactacttatggaagtccacggcaacggcaaacgcccctccccagaaaggcgcgaagaaaactccttcgatcgagacacaatagcacccgaaccacccgccaaacgcgtatgcaccatcagcccagcaccccgacactccccagccctcacggtccctctaatgaacccgggcggacaattccaccccaccccaccacccctacaacactacacattagaagacatagccacatctcacctctaccgcgaacccaataaaatgctggaacaccgcgaagtccgagatagacaccattctctaggactaaatggaggctaccaagacgaacttgtcgaccacagactcacagaacgcgaatgggccgacgaatggaagcacctcgatcatgcccttaactgtatcatggagatggtagagaaaacaagacgatccatggcagttctacgtcgatgccaagagagcgaccgcgaagaactcaactactggaaacgccgctacaacgaaaacacagaactacgaaaaaccggcaccgaactcgtctcccgtcagcactccccgggaagcgccgactcccttagcaacgactcacaacgcgagttcaactctcgccccggaacaggctacgttcctgtcgagttctggaagaaaactgaagaagccgtaaacaaagtcaaaatccaagccatgtcagaagtccaaaaagccgtagcagaagccgaacaaaaggctttcgaagtaattgcaaccgaacgcgcacgtatggaacaaaccatagcagatgtaaaaagacaagccgccgaagacgccttcctcgtcataaacgaacaagaagaatccaccgaaaactgttggaactgcggccgtaaagcctccgaaacatgttctggctgcaacattgcccgttactgtgggtccttctgccaacacaaagattgggaacgccaccaccgcctctgcggacaaaacctccacggccaaagcccccatggtcaaggtagaccactactacccgttggacgcggctccagcgcacgatcagccgactgctcagtgccatcccccgcccttgacaaaacctccgccacaacctcgcgatcatccacaccagcctcagtaacagccatagacaccaacgggctttga

SEQ ID NO: 798 - RNA, 1634 nt, synthetic construct
  misc_feature 1..1634: note = Homo sapiens__Q01196-1__RUNX1(K83E_R174Q) mRNA wt
  source 1..1634: mol_type = other RNA
aggagagtcccgcagtcggcgtccagcggctctgcttgttcgtgtgtgtgtcgttgcaggccttattcaagcttaccatgcgtatccccgtagatgccagcacgagccgccgcttcacgccgccttccaccgcgctgagcccaggcaagatgagcgaggcgttgccgctgggcgccccggacgccggcgctgccctggccggcaagctgaggagcggcgaccgcagcatggtggaggtgctggccgaccacccgggcgagctggtgcgcaccgacagccccaacttcctctgctccgtgctgcctacgcactggcgctgcaacgagaccctgcccatcgctttcaaggtggtggccctaggggatgttccagatggcactctggtcactgtgatggctggcaatgatgaaaactactcggctgagctgagaaatgctaccgcagccatgaagaaccaggttgcaagatttaatgacctcaggtttgtcggtcgaagtggaagagggaaaagcttcactctgaccatcactgtcttcacaaacccaccgcaagtcgccacctaccacagagccatcaaaatcacagtggatgggccccaggaacctcgaagacatcggcagaaactagatgatcagaccaagcccgggagcttgtccttttccgagcggctcagtgaactggagcagctgcggcgcacagccatgagggtcagcccacaccacccagcccccacgcccaaccctcgtgcctccctgaaccactccactgcctttaaccctcagcctcagagtcagatgcaggatacaaggcagatccaaccatccccaccgtggtcctacgatcagtcctaccaatacctgggatccattgcctctccttctgtgcacccagcaacgcccatttcacctggacgtgccagcggcatgacaaccctctctgcagaactttccagtcgactctcaacggcacccgacctgacagcgttcagcgacccgcgccagttccccgcgctgccctccatctccgacccccgcatgcactatccaggcgccttcacctactccccgacgccggtcacctcgggcatcggcatcggcatgtcggccatgggctcggccacgcgctaccacacctacctgccgccgccctaccccggctcgtcgcaagcgcagggaggcccgttccaagccagctcgccctcctaccacctgtactacggcgcctcggccggctcctaccagttctccatggtgggcggcgagcgctcgccgccgcgcatcctgccgccctgcaccaacgcctccaccggctccgcgctgctcaaccccagcctcccgaaccagagcgacgtggtggaggccgagggcagccacagcaactcccccaccaacatggcgccctccgcgcgcctggaggaggccgtgtggaggccctactgaggactagtccctgttcccagagcccacttttttttctttttttgaaataaaatagcctgtctttcagatctcaaaggctcttttcagagccaccaaaaaaaaaaaaaaaaaaaaaaaaaaaaaaaaaaaaaaaaaaaaaaaaaaaaaaaaaaaaaaaaaaaaaaaaaaaaaaaaaaaaaaaaaaaaaaaaaaaaa

SEQ ID NO: 799 - RNA, 2108 nt, synthetic construct
  misc_feature 1..2108: note = Homo sapiens____CBFbeta(1-165)_SMMHC(1527-1972) mRNA wt
  source 1..2108: mol_type = other RNA
aggagagtcccgcagtcggcgtccagcggctctgcttgttcgtgtgtgtgtcgttgcaggccttattcaagcttaccatgccgcgcgtcgtgcccgaccagagaagcaagttcgagaacgaggagttttttaggaagctgagccgcgagtgtgagattaagtacacgggcttcagggaccggccccacgaggaacgccaggcacgcttccagaacgcctgccgcgacggccgctcggaaatcgcttttgtggccacaggaaccaatctgtctctccagttttttccggccagctggcagggagaacagcgacaaacacctagccgagagtatgtcgacttagaaagagaagcaggcaaggtatatttgaaggctcccatgattctgaatggagtctgtgttatctggaaaggctggattgatctccaaagactggatggtatgggctgtctggagtttgatgaggagcgagcccagcaggaggatgcattagcacaacaggcctttgaagaggctcggagaaggacacgcgaatttgaagatagagacaggtctcatcgggaggaaatggaggtccatgagctggagaagtccaagcgggccctggagacccagatggaggagatgaagacgcagctggaagagctggaggacgagctgcaagccacggaggacgccaaactgcggctggaagtcaacatgcaggcgctcaagggccagttcgaaagggatctccaagcccgggacgagcagaatgaggagaagaggaggcaactgcagagacagcttcacgagtatgagacggaactggaagacgagcgaaagcaacgtgccctggcagctgcagcaaagaagaagctggaaggggacctgaaagacctggagcttcaggccgactctgccatcaaggggagggaggaagccatcaagcagctacgcaaactgcaggctcagatgaaggactttcaaagagagctggaagatgcccgtgcctccagagatgagatctttgccacagccaaagagaatgagaagaaagccaagagcttggaagcagacctcatgcagctacaagaggacctcgccgccgctgagagggctcgcaaacaagcggacctcgagaaggaggaactggcagaggagctggccagtagcctgtcgggaaggaacgcactccaggacgagaagcgccgcctggaggcccggatcgcccagctggaggaggagctggaggaggagcagggcaacatggaggccatgagcgaccgggtccgcaaagccacacagcaggccgagcagctcagcaacgagctggccacagagcgcagcacggcccagaagaatgagagtgcccggcagcagctcgagcggcagaacaaggagctccggagcaagctccacgagatggagggggccgtcaagtccaagttcaagtccaccatcgcggcgctggaggccaagattgcacagctggaggagcaggtcgagcaggaggccagagagaaacaggcggccaccaagtcgctgaagcagaaagacaagaagctgaaggaaatcttgctgcaggtggaggacgagcgcaagatggccgagcagtacaaggagcaggcagagaaaggcaatgccagggtcaagcagctcaagaggcagctggaggaggcagaggaggagtcccagcgcatcaacgccaaccgcaggaagctgcagcgggagctggatgaggccacggagagcaacgaggccatgggccgcgaggtgaacgcactcaagagcaagctcaggcgaggaaacgagacctctttcgttccttctagaaggtctggaggacgtagagttattgaaaatgcagatggttctgaggaggaaacggacactcgagacgcagacttcaatggaaccaaggccagtgaatgaggactagtccctgttcccagagcccacttttttttctttttttgaaataaaatagcctgtctttcagatctcaaaggctcttttcagagccaccaaaaaaaaaaaaaaaaaaaaaaaaaaaaaaaaaaaaaaaaaaaaaaaaaaaaaaaaaaaaaaaaaaaaaaaaaaaaaaaaaaaaaaaaaaaaaaaaaaaaa

SEQ ID NO: 800 - RNA, 1823 nt, synthetic construct
  misc_feature 1..1823: note = Artificial____CBFbeta(1-165)_SMMHC(1527-1877) mRNA wt
  source 1..1823: mol_type = other RNA
aggagagtcccgcagtcggcgtccagcggctctgcttgttcgtgtgtgtgtcgttgcaggccttattcaagcttaccatgccgcgcgtcgtgcccgaccagagaagcaagttcgagaacgaggagttttttaggaagctgagccgcgagtgtgagattaagtacacgggcttcagggaccggccccacgaggaacgccaggcacgcttccagaacgcctgccgcgacggccgctcggaaatcgcttttgtggccacaggaaccaatctgtctctccagttttttccggccagctggcagggagaacagcgacaaacacctagccgagagtatgtcgacttagaaagagaagcaggcaaggtatatttgaaggctcccatgattctgaatggagtctgtgttatctggaaaggctggattgatctccaaagactggatggtatgggctgtctggagtttgatgaggagcgagcccagcaggaggatgcattagcacaacaggcctttgaagaggctcggagaaggacacgcgaatttgaagatagagacaggtctcatcgggaggaaatggaggtccatgagctggagaagtccaagcgggccctggagacccagatggaggagatgaagacgcagctggaagagctggaggacgagctgcaagccacggaggacgccaaactgcggctggaagtcaacatgcaggcgctcaagggccagttcgaaagggatctccaagcccgggacgagcagaatgaggagaagaggaggcaactgcagagacagcttcacgagtatgagacggaactggaagacgagcgaaagcaacgtgccctggcagctgcagcaaagaagaagctggaaggggacctgaaagacctggagcttcaggccgactctgccatcaaggggagggaggaagccatcaagcagctacgcaaactgcaggctcagatgaaggactttcaaagagagctggaagatgcccgtgcctccagagatgagatctttgccacagccaaagagaatgagaagaaagccaagagcttggaagcagacctcatgcagctacaagaggacctcgccgccgctgagagggctcgcaaacaagcggacctcgagaaggaggaactggcagaggagctggccagtagcctgtcgggaaggaacgcactccaggacgagaagcgccgcctggaggcccggatcgcccagctggaggaggagctggaggaggagcagggcaacatggaggccatgagcgaccgggtccgcaaagccacacagcaggccgagcagctcagcaacgagctggccacagagcgcagcacggcccagaagaatgagagtgcccggcagcagctcgagcggcagaacaaggagctccggagcaagctccacgagatggagggggccgtcaagtccaagttcaagtccaccatcgcggcgctggaggccaagattgcacagctggaggagcaggtcgagcaggaggccagagagaaacaggcggccaccaagtcgctgaagcagaaagacaagaagctgaaggaaatcttgctgcaggtggaggacgagcgcaagatggccgagcagtacaaggagcaggcagagaaaggcaatgcctgaggactagtccctgttcccagagcccacttttttttctttttttgaaataaaatagcctgtctttcagatctcaaaggctcttttcagagccaccaaaaaaaaaaaaaaaaaaaaaaaaaaaaaaaaaaaaaaaaaaaaaaaaaaaaaaaaaaaaaaaaaaaaaaaaaaaaaaaaaaaaaaaaaaaaaaaaaaaaa

SEQ ID NO: 801 - RNA, 884 nt, synthetic construct
  misc_feature 1..884: note = Artificial____CBFbeta(1-165)_Linker_Lifeact mRNA wt
  source 1..884: mol_type = other RNA
aggagagtcccgcagtcggcgtccagcggctctgcttgttcgtgtgtgtgtcgttgcaggccttattcaagcttaccatgccgcgcgtcgtgcccgaccagagaagcaagttcgagaacgaggagttttttaggaagctgagccgcgagtgtgagattaagtacacgggcttcagggaccggccccacgaggaacgccaggcacgcttccagaacgcctgccgcgacggccgctcggaaatcgcttttgtggccacaggaaccaatctgtctctccagttttttccggccagctggcagggagaacagcgacaaacacctagccgagagtatgtcgacttagaaagagaagcaggcaaggtatatttgaaggctcccatgattctgaatggagtctgtgttatctggaaaggctggattgatctccaaagactggatggtatgggctgtctggagtttgatgaggagcgagcccagcaggaggatgcattagcacaacaggcctttgaagaggctcggagaaggacacgcgaatttgaagatagagacaggtctcatcgggaggaaatggagggcgggagcggcgggtccggcgggagcggcggctccgggggcgggggcgtggccgacctgatcaagaagttcgagagcatcagcaaggaggagggggatccaccggtcgccacctgaggactagtccctgttcccagagcccacttttttttctttttttgaaataaaatagcctgtctttcagatctcaaaggctcttttcagagccaccaaaaaaaaaaaaaaaaaaaaaaaaaaaaaaaaaaaaaaaaaaaaaaaaaaaaaaaaaaaaaaaaaaaaaaaaaaaaaaaaaaaaaaaaaaaaaaaaaaaaa

SEQ ID NO: 802 - RNA, 851 nt, synthetic construct
  misc_feature 1..851: note = Artificial____CBFbeta(1-165)_HIF1alpha(549-575) mRNA wt
  source 1..851: mol_type = other RNA
aggagagtcccgcagtcggcgtccagcggctctgcttgttcgtgtgtgtgtcgttgcaggccttattcaagcttaccatgccgcgcgtcgtgcccgaccagagaagcaagttcgagaacgaggagttttttaggaagctgagccgcgagtgtgagattaagtacacgggcttcagggaccggccccacgaggaacgccaggcacgcttccagaacgcctgccgcgacggccgctcggaaatcgcttttgtggccacaggaaccaatctgtctctccagttttttccggccagctggcagggagaacagcgacaaacacctagccgagagtatgtcgacttagaaagagaagcaggcaaggtatatttgaaggctcccatgattctgaatggagtctgtgttatctggaaaggctggattgatctccaaagactggatggtatgggctgtctggagtttgatgaggagcgagcccagcaggaggatgcattagcacaacaggcctttgaagaggctcggagaaggacacgcgaatttgaagatagagacaggtctcatcgggaggaaatggagccattttctactcaggacacagatttagacttggagatgttagctccctatatcccaatggatgatgacttccagttacgttgaggactagtccctgttcccagagcccacttttttttctttttttgaaataaaatagcctgtctttcagatctcaaaggctcttttcagagccaccaaaaaaaaaaaaaaaaaaaaaaaaaaaaaaaaaaaaaaaaaaaaaaaaaaaaaaaaaaaaaaaaaaaaaaaaaaaaaaaaaaaaaaaaaaaaaaaaaaaaa

SEQ ID NO: 803 - RNA, 896 nt, synthetic construct
  misc_feature 1..896: note Artificial____CBFbeta(1-165)_Linker_HIF1alpha(549-575) mRNA wt
  source 1..896: mol_type = other RNA
aggagagtcccgcagtcggcgtccagcggctctgcttgttcgtgtgtgtgtcgttgcaggccttattcaagcttaccatgccgcgcgtcgtgcccgaccagagaagcaagttcgagaacgaggagttttttaggaagctgagccgcgagtgtgagattaagtacacgggcttcagggaccggccccacgaggaacgccaggcacgcttccagaacgcctgccgcgacggccgctcggaaatcgcttttgtggccacaggaaccaatctgtctctccagttttttccggccagctggcagggagaacagcgacaaacacctagccgagagtatgtcgacttagaaagagaagcaggcaaggtatatttgaaggctcccatgattctgaatggagtctgtgttatctggaaaggctggattgatctccaaagactggatggtatgggctgtctggagtttgatgaggagcgagcccagcaggaggatgcattagcacaacaggcctttgaagaggctcggagaaggacacgcgaatttgaagatagagacaggtctcatcgggaggaaatggagggcgggagcggcgggtccggcgggagcggcggctccgggggcgggccattttctactcaggacacagatttagacttggagatgttagctccctatatcccaatggatgatgacttccagttacgttgaggactagtccctgttcccagagcccacttttttttctttttttgaaataaaatagcctgtctttcagatctcaaaggctcttttcagagccaccaaaaaaaaaaaaaaaaaaaaaaaaaaaaaaaaaaaaaaaaaaaaaaaaaaaaaaaaaaaaaaaaaaaaaaaaaaaaaaaaaaaaaaaaaaaaaaaaaaaaa

SEQ ID NO: 804 - RNA, 2531 nt, synthetic construct
  misc_feature 1..2531: note = Artificial____RUNX1(1-177)_N_RUNX1T1a(31-604) mRNA wt
  source 1..2531: mol_type = other RNA
aggagagtcccgcagtcggcgtccagcggctctgcttgttcgtgtgtgtgtcgttgcaggccttattcaagcttaccatgcgtatccccgtagatgccagcacgagccgccgcttcacgccgccttccaccgcgctgagcccaggcaagatgagcgaggcgttgccgctgggcgccccggacgccggcgctgccctggccggcaagctgaggagcggcgaccgcagcatggtggaggtgctggccgaccacccgggcgagctggtgcgcaccgacagccccaacttcctctgctccgtgctgcctacgcactggcgctgcaacaagaccctgcccatcgctttcaaggtggtggccctaggggatgttccagatggcactctggtcactgtgatggctggcaatgatgaaaactactcggctgagctgagaaatgctaccgcagccatgaagaaccaggttgcaagatttaatgacctcaggtttgtcggtcgaagtggaagagggaaaagcttcactctgaccatcactgtcttcacaaacccaccgcaagtcgccacctaccacagagccatcaaaatcacagtggatgggccccgagaacctcgaaaccgtactgagaagcactccacaatgccagactcacctgtggatgtgaagacgcaatctaggctgactcctccaacaatgccacctcccccaactactcaaggagctccaagaaccagttcatttacaccgacaacgttaactaatggcacgagccattctcctacagccttgaatggcgccccctcaccacccaatggcttcagcaatgggccttcctcttcttcctcctcctctctggctaatcaacagctgcccccagcctgtggtgccaggcaactcagcaagctgaaaaggttccttactaccctgcagcagtttggcaatgacatttcacccgagataggagaaagagttcgcaccctcgttctgggactagtgaactccactttgacaattgaagaatttcattccaaactgcaagaagctactaacttcccactgagaccttttgtcatcccatttttgaaggccaacttgcccctgctgcagcgtgagctcctccactgcgcaagactggccaaacagaaccctgcccagtacctcgcccagcatgaacagctgcttctggatgccagcaccacctcacctgttgactcctcagagctgcttctcgatgtgaacgaaaacgggaagaggcgaactccagacagaaccaaagaaaatggctttgacagagagcctttgcactcagaacatccaagcaagcgaccatgcactattagcccaggccagcggtacagtccaaataacggcttatcctaccagcccaatggcctgcctcaccctaccccacctccacctcagcattaccgtttggatgatatggccattgcccaccactacagggactcctatcgacaccccagccacagggacctcagggacagaaacagacctatggggttgcatggcacacgtcaagaagaaatgattgatcacagactaacagacagagaatgggcagaagagtggaaacatcttgaccatctgttaaactgcataatggacatggtagaaaaaacaaggcgatctctcaccgtactaaggcggtgtcaagaagcagaccgggaagaattgaattactggatccggcggtacagtgacgccgaggacttaaaaaaaggtggcggcagtagcagcagccactctaggcagcagagtcccgtcaacccagacccagttgcactagacgcgcatcgggaattccttcacaggcctgcgtctggatacgtgccagaggagatctggaagaaagctgaggaggccgtcaatgaggtgaagcgccaggcgatgacggagctgcagaaggccgtgtctgaggcggagcggaaagcccacgacatgatcacaacagagagggccaagatggagcgcacggtcgccgaggccaaacggcaggcggcggaggacgcactggcagttatcaatcagcaggaggattcaagcgagagttgctggaattgtggccgtaaagcgagtgaaacctgcagtggctgtaacacagcccgatactgtggctcattttgccagcacaaagactgggagaagcaccatcacatctgtggacagaccctgcaggcccagcagcagggagacacacctgcagtcagctcctctgtcacgcccaacagcggggctgggagcccgatggacacaccaccagcagccactccgaggtcaaccaccccgggaaccccttccaccatagagacaacccctcgctgaggactagtccctgttcccagagcccacttttttttctttttttgaaataaaatagcctgtctttcagatctcaaaggctcttttcagagccaccaaaaaaaaaaaaaaaaaaaaaaaaaaaaaaaaaaaaaaaaaaaaaaaaaaaaaaaaaaaaaaaaaaaaaaaaaaaaaaaaaaaaaaaaaaaaaaaaaaaaa

SEQ ID NO: 805 - RNA, 1046 nt, synthetic construct
  misc_feature 1..1046: note = Artificial____RUNX1(1-241)_RUNX1T1b(short) mRNA wt
  source 1..1046: mol_type = other RNA
aggagagtcccgcagtcggcgtccagcggctctgcttgttcgtgtgtgtgtcgttgcaggccttattcaagcttaccatgcgtatccccgtagatgccagcacgagccgccgcttcacgccgccttccaccgcgctgagcccaggcaagatgagcgaggcgttgccgctgggcgccccggacgccggcgctgccctggccggcaagctgaggagcggcgaccgcagcatggtggaggtgctggccgaccacccgggcgagctggtgcgcaccgacagccccaacttcctctgctccgtgctgcctacgcactggcgctgcaacaagaccctgcccatcgctttcaaggtggtggccctaggggatgttccagatggcactctggtcactgtgatggctggcaatgatgaaaactactcggctgagctgagaaatgctaccgcagccatgaagaaccaggttgcaagatttaatgacctcaggtttgtcggtcgaagtggaagagggaaaagcttcactctgaccatcactgtcttcacaaacccaccgcaagtcgccacctaccacagagccatcaaaatcacagtggatgggccccgagaacctcgaagacatcggcagaaactagatgatcagaccaagcccgggagcttgtccttttccgagcggctcagtgaactggagcagctgcggcgcacagccatgagggtcagcccacaccacccagcccccacgcccaaccctcgtgcctccctgaaccactccactgcctttaaccctcagcctcagagtcagatgcaggaggtgggcttctgccacgtcgcccaggtggggctgaagctcctgggctgaggactagtccctgttcccagagcccacttttttttctttttttgaaataaaatagcctgtctttcagatctcaaaggctcttttcagagccaccaaaaaaaaaaaaaaaaaaaaaaaaaaaaaaaaaaaaaaaaaaaaaaaaaaaaaaaaaaaaaaaaaaaaaaaaaaaaaaaaaaaaaaaaaaaaaaaaaaaaa

SEQ ID NO: 806 - RNA, 2750 nt, synthetic construct
  misc_feature 1..2750: note = Artificial____RUNX1(1-241)_V_RUNX1T1b(22-604) mRNA wt
  source 1..2750: mol_type = other RNA
aggagagtcccgcagtcggcgtccagcggctctgcttgttcgtgtgtgtgtcgttgcaggccttattcaagcttaccatgcgtatccccgtagatgccagcacgagccgccgcttcacgccgccttccaccgcgctgagcccaggcaagatgagcgaggcgttgccgctgggcgccccggacgccggcgctgccctggccggcaagctgaggagcggcgaccgcagcatggtggaggtgctggccgaccacccgggcgagctggtgcgcaccgacagccccaacttcctctgctccgtgctgcctacgcactggcgctgcaacaagaccctgcccatcgctttcaaggtggtggccctaggggatgttccagatggcactctggtcactgtgatggctggcaatgatgaaaactactcggctgagctgagaaatgctaccgcagccatgaagaaccaggttgcaagatttaatgacctcaggtttgtcggtcgaagtggaagagggaaaagcttcactctgaccatcactgtcttcacaaacccaccgcaagtcgccacctaccacagagccatcaaaatcacagtggatgggccccgagaacctcgaagacatcggcagaaactagatgatcagaccaagcccgggagcttgtccttttccgagcggctcagtgaactggagcagctgcggcgcacagccatgagggtcagcccacaccacccagcccccacgcccaaccctcgtgcctccctgaaccactccactgcctttaaccctcagcctcagagtcagatgcaggtgggtcctgagaaaagggtgccagcgatgcctggatcgcctgtggaagtgaagatacagtccagatcctcacctcccaccatgccacccctcccaccaataaatcctggaggaccgaggccagtgtccttcactcctactgcattaagcaatggcatcaaccattctcctcctaccctgaatggtgccccatcaccgccacagagattcagcaatggtcctgcctcctccacatcatctgcactcacaaatcagcaattgccagccacttgtggtgctcgacaactcagcaagttgaaacgctttcttaccactctgcaacagtttggcaatgacatctcccctgagattggggagaaggtgcggactcttgttcttgcactggtgaactcaacagtgacaattgaggaattccactgtaagctccaagaagccacaaactttccccttcgtccttttgtgattccatttctcaaggccaacctgcccctgctgcagcgggaactgctgcactgcgctcgggcggccaagcagaccccatcccagtacctggctcagcacgaacaccttctgctcaacacaagcattgcatcgcctgctgactcgtcagagttgctcatggaggtgcacggaaatgggaagaggcccagtccagagaggagagaagagaatagttttgatagagacacaattgctcctgagcctcctgccaagagagtatgtaccatcagccctgctcctcggcacagtcctgctctcactgtgcccctcatgaatcccgggggccaattccatcctacccctccacctcttcagcattacaccttagaggatattgcaacttctcacctgtatcgggaacccaacaagatgctagagcatcgagaagttcgtgatagacaccacagtcttggtctaaatggaggctatcaagatgagttggtagatcatcgtttgacagaaagggaatgggctgatgaatggaaacatcttgaccatgcgctgaattgcattatggaaatggtagagaaaacaaggcgctctatggcagttctgcggcgctgtcaggaatcagatcgtgaagaactcaactactggaaaagacggtacaatgaaaacacagagctgaggaaaacggggaccgagttggtctccaggcagcacagccctgggagtgcagattctctcagcaatgattctcagagagagttcaacagcaggccaggtacaggatacgtacctgtggagttttggaaaaaaacagaagaagctgtgaataaggtgaaaattcaggccatgtcagaagtacagaaggccgtcgctgaggcagagcagaaagcctttgaagtgattgcaacagagagagcacgaatggagcaaaccatagcggatgtcaagcggcaggccgcagaggatgctttcctcgtcatcaatgagcaagaggagtccacggagaactgctggaactgtggccgcaaagccagcgagacatgcagtggctgcaatatcgcgcgatactgtggctctttctgccagcacaaggactgggagcggcaccaccgcctctgtggtcagaacctgcatggccagagcccccacggccagggccggccgctgcttcctgtaggcaggggctcctctgccaggtccgccgactgcagcgtgcccagcccagccctcgacaagacctcggcaaccacatcgcgttcctcaacacctgcttctgtgacagctatcgacaccaacggactctgaggactagtccctgttcccagagcccacttttttttctttttttgaaataaaatagcctgtctttcagatctcaaaggctcttttcagagccaccaaaaaaaaaaaaaaaaaaaaaaaaaaaaaaaaaaaaaaaaaaaaaaaaaaaaaaaaaaaaaaaaaaaaaaaaaaaaaaaaaaaaaaaaaaaaaaaaaaaaa

SEQ ID NO: 807 - RNA, 2750 nt, synthetic construct
  misc_feature 1..2750: note = Artificial____RUNX1(1-241)_I_RUNX1T1b(22-604) mRNA wt
  source 1..2750: mol_type = other RNA
aggagagtcccgcagtcggcgtccagcggctctgcttgttcgtgtgtgtgtcgttgcaggccttattcaagcttaccatgcgtatccccgtagatgccagcacgagccgccgcttcacgccgccttccaccgcgctgagcccaggcaagatgagcgaggcgttgccgctgggcgccccggacgccggcgctgccctggccggcaagctgaggagcggcgaccgcagcatggtggaggtgctggccgaccacccgggcgagctggtgcgcaccgacagccccaacttcctctgctccgtgctgcctacgcactggcgctgcaacaagaccctgcccatcgctttcaaggtggtggccctaggggatgttccagatggcactctggtcactgtgatggctggcaatgatgaaaactactcggctgagctgagaaatgctaccgcagccatgaagaaccaggttgcaagatttaatgacctcaggtttgtcggtcgaagtggaagagggaaaagcttcactctgaccatcactgtcttcacaaacccaccgcaagtcgccacctaccacagagccatcaaaatcacagtggatgggccccgagaacctcgaagacatcggcagaaactagatgatcagaccaagcccgggagcttgtccttttccgagcggctcagtgaactggagcagctgcggcgcacagccatgagggtcagcccacaccacccagcccccacgcccaaccctcgtgcctccctgaaccactccactgcctttaaccctcagcctcagagtcagatgcagatcggtcctgagaaaagggtgccagcgatgcctggatcgcctgtggaagtgaagatacagtccagatcctcacctcccaccatgccacccctcccaccaataaatcctggaggaccgaggccagtgtccttcactcctactgcattaagcaatggcatcaaccattctcctcctaccctgaatggtgccccatcaccgccacagagattcagcaatggtcctgcctcctccacatcatctgcactcacaaatcagcaattgccagccacttgtggtgctcgacaactcagcaagttgaaacgctttcttaccactctgcaacagtttggcaatgacatctcccctgagattggggagaaggtgcggactcttgttcttgcactggtgaactcaacagtgacaattgaggaattccactgtaagctccaagaagccacaaactttccccttcgtccttttgtgattccatttctcaaggccaacctgcccctgctgcagcgggaactgctgcactgcgctcgggcggccaagcagaccccatcccagtacctggctcagcacgaacaccttctgctcaacacaagcattgcatcgcctgctgactcgtcagagttgctcatggaggtgcacggaaatgggaagaggcccagtccagagaggagagaagagaatagttttgatagagacacaattgctcctgagcctcctgccaagagagtatgtaccatcagccctgctcctcggcacagtcctgctctcactgtgcccctcatgaatcccgggggccaattccatcctacccctccacctcttcagcattacaccttagaggatattgcaacttctcacctgtatcgggaacccaacaagatgctagagcatcgagaagttcgtgatagacaccacagtcttggtctaaatggaggctatcaagatgagttggtagatcatcgtttgacagaaagggaatgggctgatgaatggaaacatcttgaccatgcgctgaattgcattatggaaatggtagagaaaacaaggcgctctatggcagttctgcggcgctgtcaggaatcagatcgtgaagaactcaactactggaaaagacggtacaatgaaaacacagagctgaggaaaacggggaccgagttggtctccaggcagcacagccctgggagtgcagattctctcagcaatgattctcagagagagttcaacagcaggccaggtacaggatacgtacctgtggagttttggaaaaaaacagaagaagctgtgaataaggtgaaaattcaggccatgtcagaagtacagaaggccgtcgctgaggcagagcagaaagcctttgaagtgattgcaacagagagagcacgaatggagcaaaccatagcggatgtcaagcggcaggccgcagaggatgctttcctcgtcatcaatgagcaagaggagtccacggagaactgctggaactgtggccgcaaagccagcgagacatgcagtggctgcaatatcgcgcgatactgtggctctttctgccagcacaaggactgggagcggcaccaccgcctctgtggtcagaacctgcatggccagagcccccacggccagggccggccgctgcttcctgtaggcaggggctcctctgccaggtccgccgactgcagcgtgcccagcccagccctcgacaagacctcggcaaccacatcgcgttcctcaacacctgcttctgtgacagctatcgacaccaacggactctgaggactagtccctgttcccagagcccacttttttttctttttttgaaataaaatagcctgtctttcagatctcaaaggctcttttcagagccaccaaaaaaaaaaaaaaaaaaaaaaaaaaaaaaaaaaaaaaaaaaaaaaaaaaaaaaaaaaaaaaaaaaaaaaaaaaaaaaaaaaaaaaaaaaaaaaaaaaaaa

SEQ ID NO: 808 - RNA, 1634 nt, synthetic construct
  misc_feature 1..1634: note = Homo sapiens__Q01196-1__RUNX1(K83E_R174Q) mRNA wt mod
  source 1..1634: mol_type = other RNA
aggagagtcccgcagtcggcgtccagcggctctgcttgttcgtgtgtgtgtcgttgcaggccttattcaagcttaccatgcgtatccccgtagatgccagcacgagccgccgcttcacgccgccttccaccgcgctgagcccaggcaagatgagcgaggcgttgccgctgggcgccccggacgccggcgctgccctggccggcaagctgaggagcggcgaccgcagcatggtggaggtgctggccgaccacccgggcgagctggtgcgcaccgacagccccaacttcctctgctccgtgctgcctacgcactggcgctgcaacgagaccctgcccatcgctttcaaggtggtggccctaggggatgttccagatggcactctggtcactgtgatggctggcaatgatgaaaactactcggctgagctgagaaatgctaccgcagccatgaagaaccaggttgcaagatttaatgacctcaggtttgtcggtcgaagtggaagagggaaaagtttcactctgaccatcactgtcttcacaaacccaccgcaagtcgccacctaccacagagccatcaaaatcacagtggatgggccccaggaacctcgaagacatcggcagaaactagatgatcagaccaagcccgggagcttgtccttttccgagcggctcagtgaactggagcagctgcggcgcacagccatgagggtcagcccacaccacccagcccccacgcccaaccctcgtgcctccctgaaccactccactgcctttaaccctcagcctcagagtcagatgcaggatacaaggcagatccaaccatccccaccgtggtcctacgatcagtcctaccaatacctgggatccattgcctctccttctgtgcacccagcaacgcccatttcacctggacgtgccagcggcatgacaaccctctctgcagaactttccagtcgactctcaacggcacccgacctgacagcgttcagcgacccgcgccagttccccgcgctgccctccatctccgacccccgcatgcactatccaggcgccttcacctactccccgacgccggtcacctcgggcatcggcatcggcatgtcggccatgggctcggccacgcgctaccacacctacctgccgccgccctaccccggctcgtcgcaagcgcagggaggcccgttccaagccagctcgccctcctaccacctgtactacggcgcctcggccggctcctaccagttctccatggtgggcggcgagcgctcgccgccgcgcatcctgccgccctgcaccaacgcctccaccggctccgcgctgctcaaccccagcctcccgaaccagagcgacgtggtggaggccgagggcagccacagcaactcccccaccaacatggcgccctccgcgcgcctggaggaggccgtgtggaggccctactgaggactagtccctgttcccagagcccacttttttttctttttttgaaataaaatagcctgtctttcagatctcaaaggctcttttcagagccaccaaaaaaaaaaaaaaaaaaaaaaaaaaaaaaaaaaaaaaaaaaaaaaaaaaaaaaaaaaaaaaaaaaaaaaaaaaaaaaaaaaaaaaaaaaaaaaaaaaaaa

SEQ ID NO: 809 - RNA, 2108 nt, synthetic construct
  misc_feature 1..2108: note = Homo sapiens____CBFbeta(1-165)_SMMHC(1527-1972) mRNA wt mod
  source 1..2108: mol_type = other RNA
aggagagtcccgcagtcggcgtccagcggctctgcttgttcgtgtgtgtgtcgttgcaggccttattcaagcttaccatgccgcgcgtcgtgcccgaccagagaagcaagtttgagaacgaggagttctttaggaagctgagccgcgagtgtgagattaagtacacgggctttagggaccggccccacgaggaacgccaggcacgcttccagaacgcctgccgcgacggccgctcggaaatcgcttttgtggccacaggaaccaatctgtctctccagttctttccggccagctggcagggagaacagcgacaaacacctagccgagagtatgtcgacttagaaagagaagcaggcaaggtatatttgaaggctcccatgattctgaatggagtctgtgttatctggaaaggctggattgatctccaaagactggatggtatgggctgtctggagtttgatgaggagcgagcccagcaggaggatgcattagcacaacaggcctttgaagaggctcggagaaggacacgcgaatttgaagatagagacaggtctcatcgggaggaaatggaggtccatgagctggagaagtccaagcgggccctggagacccagatggaggagatgaagacgcagctggaggaactggaggacgagctgcaagccacggaggacgccaaactgcggctggaagtcaacatgcaggcgctcaagggccagttcgaaagggatctccaagcccgggacgagcagaatgaggagaagaggaggcaactgcagagacagcttcacgagtatgagacggaactggaagacgagcgaaagcaacgtgccctggcagctgcagcaaagaagaagctggaaggggacctgaaagacctggagcttcaggccgactctgccatcaaggggagggaggaagccatcaagcagctacgcaaactgcaggctcagatgaaggactttcaaagagagctggaagatgcccgtgcctccagagatgagatctttgccacagccaaagagaatgagaagaaagccaagagcttggaagcagacctcatgcagctacaagaggacctcgccgccgctgagagggctcgcaaacaagcggacctcgagaaggaggaactggcagaggagctggccagtagcctgtcgggaaggaacgcactccaggacgagaagcgccgcctggaggcccggatcgcccagctggaggaggagctggaggaggagcagggcaacatggaggccatgagcgaccgggtccgcaaagccacacagcaggccgagcagctcagcaacgagctggccacagagcgcagcacggcccagaagaatgagagtgcccggcagcagctcgagcggcagaacaaggagctccggagcaagctccacgagatggagggggccgtcaagtccaagttcaagtccaccatcgcggcgctggaggccaagattgcacagctggaggagcaggtcgagcaggaggccagagagaaacaggcggccaccaagtcgctgaagcagaaagacaagaagctgaaggaaatcttgctccaggtggaggacgagcgcaagatggccgagcagtacaaggagcaggcagagaaaggcaatgccagggtcaagcagctgaagaggcagctggaggaggcagaggaggagtcccagcgcatcaacgccaaccgcaggaagctgcagcgggagctggatgaggccacggagagcaacgaggccatgggccgcgaggtgaacgcactcaagagcaagctcaggcgaggaaacgagacctctttcgttccttctagaaggtctggaggacgtagagttattgaaaatgcagatggttctgaggaggaaacggacactcgagacgcagacttcaatggaaccaaggccagtgaatgaggactagtccctgttcccagagcccacttttttttctttttttgaaataaaatagcctgtctttcagatctcaaaggctcttttcagagccaccaaaaaaaaaaaaaaaaaaaaaaaaaaaaaaaaaaaaaaaaaaaaaaaaaaaaaaaaaaaaaaaaaaaaaaaaaaaaaaaaaaaaaaaaaaaaaaaaaaaaa

SEQ ID NO: 810 - RNA, 1823 nt, synthetic construct
  misc_feature 1..1823: note = Artificial____CBFbeta(1-165)_SMMHC(1527-1877) mRNA wt mod
  source 1..1823: mol_type = other RNA
aggagagtcccgcagtcggcgtccagcggctctgcttgttcgtgtgtgtgtcgttgcaggccttattcaagcttaccatgccgcgcgtcgtgcccgaccagagaagcaagtttgagaacgaggagttctttaggaagctgagccgcgagtgtgagattaagtacacgggctttagggaccggccccacgaggaacgccaggcacgcttccagaacgcctgccgcgacggccgctcggaaatcgcttttgtggccacaggaaccaatctgtctctccagttctttccggccagctggcagggagaacagcgacaaacacctagccgagagtatgtcgacttagaaagagaagcaggcaaggtatatttgaaggctcccatgattctgaatggagtctgtgttatctggaaaggctggattgatctccaaagactggatggtatgggctgtctggagtttgatgaggagcgagcccagcaggaggatgcattagcacaacaggcctttgaagaggctcggagaaggacacgcgaatttgaagatagagacaggtctcatcgggaggaaatggaggtccatgagctggagaagtccaagcgggccctggagacccagatggaggagatgaagacgcagctggaggaactggaggacgagctgcaagccacggaggacgccaaactgcggctggaagtcaacatgcaggcgctcaagggccagttcgaaagggatctccaagcccgggacgagcagaatgaggagaagaggaggcaactgcagagacagcttcacgagtatgagacggaactggaagacgagcgaaagcaacgtgccctggcagctgcagcaaagaagaagctggaaggggacctgaaagacctggagcttcaggccgactctgccatcaaggggagggaggaagccatcaagcagctacgcaaactgcaggctcagatgaaggactttcaaagagagctggaagatgcccgtgcctccagagatgagatctttgccacagccaaagagaatgagaagaaagccaagagcttggaagcagacctcatgcagctacaagaggacctcgccgccgctgagagggctcgcaaacaagcggacctcgagaaggaggaactggcagaggagctggccagtagcctgtcgggaaggaacgcactccaggacgagaagcgccgcctggaggcccggatcgcccagctggaggaggagctggaggaggagcagggcaacatggaggccatgagcgaccgggtccgcaaagccacacagcaggccgagcagctcagcaacgagctggccacagagcgcagcacggcccagaagaatgagagtgcccggcagcagctcgagcggcagaacaaggagctccggagcaagctccacgagatggagggggccgtcaagtccaagttcaagtccaccatcgcggcgctggaggccaagattgcacagctggaggagcaggtcgagcaggaggccagagagaaacaggcggccaccaagtcgctgaagcagaaagacaagaagctgaaggaaatcttgctccaggtggaggacgagcgcaagatggccgagcagtacaaggagcaggcagagaaaggcaatgcctgaggactagtccctgttcccagagcccacttttttttctttttttgaaataaaatagcctgtctttcagatctcaaaggctcttttcagagccaccaaaaaaaaaaaaaaaaaaaaaaaaaaaaaaaaaaaaaaaaaaaaaaaaaaaaaaaaaaaaaaaaaaaaaaaaaaaaaaaaaaaaaaaaaaaaaaaaaaaaa

SEQ ID NO: 811 - RNA, 884 nt, synthetic construct
  misc_feature 1..884: note = Artificial____CBFbeta(1-165)_Linker_Lifeact mRNA wt mod
  source 1..884: mol_type = other RNA
aggagagtcccgcagtcggcgtccagcggctctgcttgttcgtgtgtgtgtcgttgcaggccttattcaagcttaccatgccgcgcgtcgtgcccgaccagagaagcaagtttgagaacgaggagttctttaggaagctgagccgcgagtgtgagattaagtacacgggctttagggaccggccccacgaggaacgccaggcacgcttccagaacgcctgccgcgacggccgctcggaaatcgcttttgtggccacaggaaccaatctgtctctccagttctttccggccagctggcagggagaacagcgacaaacacctagccgagagtatgtcgacttagaaagagaagcaggcaaggtatatttgaaggctcccatgattctgaatggagtctgtgttatctggaaaggctggattgatctccaaagactggatggtatgggctgtctggagtttgatgaggagcgagcccagcaggaggatgcattagcacaacaggcctttgaagaggctcggagaaggacacgcgaatttgaagatagagacaggtctcatcgggaggaaatggagggcgggagcggcgggtccggcgggagcggcggctccgggggcgggggcgtggccgacctgatcaagaagttcgagagcatctccaaggaggagggggacccgcccgtcgccacctgaggactagtccctgttcccagagcccacttttttttctttttttgaaataaaatagcctgtctttcagatctcaaaggctcttttcagagccaccaaaaaaaaaaaaaaaaaaaaaaaaaaaaaaaaaaaaaaaaaaaaaaaaaaaaaaaaaaaaaaaaaaaaaaaaaaaaaaaaaaaaaaaaaaaaaaaaaaaaa

SEQ ID NO: 812 - RNA, 851 nt, synthetic construct
  misc_feature 1..851: note = Artificial____CBFbeta(1-165)_HIF1alpha(549-575) mRNA wt mod
  source 1..851: mol_type = other RNA
aggagagtcccgcagtcggcgtccagcggctctgcttgttcgtgtgtgtgtcgttgcaggccttattcaagcttaccatgccgcgcgtcgtgcccgaccagagaagcaagtttgagaacgaggagttctttaggaagctgagccgcgagtgtgagattaagtacacgggctttagggaccggccccacgaggaacgccaggcacgcttccagaacgcctgccgcgacggccgctcggaaatcgcttttgtggccacaggaaccaatctgtctctccagttctttccggccagctggcagggagaacagcgacaaacacctagccgagagtatgtcgacttagaaagagaagcaggcaaggtatatttgaaggctcccatgattctgaatggagtctgtgttatctggaaaggctggattgatctccaaagactggatggtatgggctgtctggagtttgatgaggagcgagcccagcaggaggatgcattagcacaacaggcctttgaagaggctcggagaaggacacgcgaatttgaagatagagacaggtctcatcgggaggaaatggagccattttctactcaggacacagatttagacttggagatgttagctccctatatcccaatggatgatgacttccagttacgttgaggactagtccctgttcccagagcccacttttttttctttttttgaaataaaatagcctgtctttcagatctcaaaggctcttttcagagccaccaaaaaaaaaaaaaaaaaaaaaaaaaaaaaaaaaaaaaaaaaaaaaaaaaaaaaaaaaaaaaaaaaaaaaaaaaaaaaaaaaaaaaaaaaaaaaaaaaaaaa

SEQ ID NO: 813 - RNA, 896 nt, synthetic construct
  misc_feature 1..896: note Artificial____CBFbeta(1-165)_Linker_HIF1alpha(549-575) mRNA wt mod
  source 1..896: mol_type = other RNA
aggagagtcccgcagtcggcgtccagcggctctgcttgttcgtgtgtgtgtcgttgcaggccttattcaagcttaccatgccgcgcgtcgtgcccgaccagagaagcaagtttgagaacgaggagttctttaggaagctgagccgcgagtgtgagattaagtacacgggctttagggaccggccccacgaggaacgccaggcacgcttccagaacgcctgccgcgacggccgctcggaaatcgcttttgtggccacaggaaccaatctgtctctccagttctttccggccagctggcagggagaacagcgacaaacacctagccgagagtatgtcgacttagaaagagaagcaggcaaggtatatttgaaggctcccatgattctgaatggagtctgtgttatctggaaaggctggattgatctccaaagactggatggtatgggctgtctggagtttgatgaggagcgagcccagcaggaggatgcattagcacaacaggcctttgaagaggctcggagaaggacacgcgaatttgaagatagagacaggtctcatcgggaggaaatggagggcgggagcggcgggtccggcgggagcggcggctccgggggcgggccattttctactcaggacacagatttagacttggagatgttagctccctatatcccaatggatgatgacttccagttacgttgaggactagtccctgttcccagagcccacttttttttctttttttgaaataaaatagcctgtctttcagatctcaaaggctcttttcagagccaccaaaaaaaaaaaaaaaaaaaaaaaaaaaaaaaaaaaaaaaaaaaaaaaaaaaaaaaaaaaaaaaaaaaaaaaaaaaaaaaaaaaaaaaaaaaaaaaaaaaaa

SEQ ID NO: 814 - RNA, 2531 nt, synthetic construct
  misc_feature 1..2531: note = Artificial____RUNX1(1-177)_N_RUNX1T1a(31-604) mRNA wt mod
  source 1..2531: mol_type = other RNA
aggagagtcccgcagtcggcgtccagcggctctgcttgttcgtgtgtgtgtcgttgcaggccttattcaagcttaccatgcgtatccccgtagatgccagcacgagccgccgcttcacgccgccttccaccgcgctgagcccaggcaagatgagcgaggcgttgccgctgggcgccccggacgccggcgctgccctggccggcaagctgaggagcggcgaccgcagcatggtggaggtgctggccgaccacccgggcgagctggtgcgcaccgacagccccaacttcctctgctccgtgctgcctacgcactggcgctgcaacaagaccctgcccatcgctttcaaggtggtggccctaggggatgttccagatggcactctggtcactgtgatggctggcaatgatgaaaactactcggctgagctgagaaatgctaccgcagccatgaagaaccaggttgcaagatttaatgacctcaggtttgtcggtcgaagtggaagagggaaaagtttcactctgaccatcactgtcttcacaaacccaccgcaagtcgccacctaccacagagccatcaaaatcacagtggatgggccccgagaacctcgaaaccgtactgagaagcactccacaatgccagactcacctgtggatgtgaagacgcaatctaggctgactcctccaacaatgccacctcccccaactactcaaggagctccaagaaccagttcatttacaccgacaacgttaactaatggcacgagccattctcctacagccttgaatggcgccccctcaccacccaatggcttcagcaatgggccttcctcttcttcctcctcctctctggctaatcaacagctgcccccagcctgtggtgccaggcaactcagcaagctgaaaaggttccttactaccctgcagcagtttggcaatgacatttcacccgagataggagaaagagttcgcaccctcgttctgggacttgtgaactccactttgacaattgaagaatttcattccaaactgcaagaagctactaacttcccactgagaccttttgtcatcccatttttgaaggccaacttgcccctgctgcagcgtgagctcctccactgcgcaagactggccaaacagaaccctgcccagtacctcgcccagcatgaacagctgcttctggatgccagcaccacctcacctgttgactcctcagagctgcttctcgatgtgaacgaaaacgggaagaggcgaactccagacagaaccaaagaaaatggctttgacagagagcctttgcactcagaacatccaagcaagcgaccatgcactattagcccaggccagcggtacagtccaaataacggcttatcctaccagcccaatggcctgcctcaccctaccccacctccacctcagcattaccgtttggatgatatggccattgcccaccactacagggactcctatcgacaccccagccacagggacctcagggacagaaacagacctatggggttgcatggcacacgtcaagaagaaatgattgatcacagactaacagacagagaatgggcagaagagtggaaacatcttgaccatctgttaaactgcataatggacatggtagaaaaaacaaggcgatctctcaccgtactaaggcggtgtcaagaagcagaccgggaagaattgaattactggatccggcggtacagtgacgccgaggacttaaaaaaaggtggcggcagtagcagcagccactctaggcagcagagtcccgtcaacccagacccagttgcactagacgcgcatcgggagttccttcacaggcctgcgtctggatacgtgccagaggagatctggaagaaagctgaggaggccgtcaatgaggtgaagcgccaggcgatgacggagctgcagaaggccgtgtctgaggcggagcggaaagcccacgacatgatcacaacagagagggccaagatggagcgcacggtcgccgaggccaaacggcaggcggcggaggacgcactggcagttatcaatcagcaggaggattcaagcgagagttgctggaattgtggccgtaaagcgagtgaaacctgcagtggctgtaacacagcccgatactgtggctcattttgccagcacaaagactgggagaagcaccatcacatctgtggacagaccctgcaggcccagcagcagggagacacacctgcagtcagctcctctgtcacgcccaacagcggggctgggagcccgatggacacaccaccagcagccactccgaggtcaaccaccccgggaaccccttccaccatagagacaacccctcgctgaggactagtccctgttcccagagcccacttttttttctttttttgaaataaaatagcctgtctttcagatctcaaaggctcttttcagagccaccaaaaaaaaaaaaaaaaaaaaaaaaaaaaaaaaaaaaaaaaaaaaaaaaaaaaaaaaaaaaaaaaaaaaaaaaaaaaaaaaaaaaaaaaaaaaaaaaaaaaa

SEQ ID NO: 815 - RNA, 1046 nt, synthetic construct
  misc_feature 1..1046: note = Artificial____RUNX1(1-241)_RUNX1T1b(short) mRNA wt mod
  source 1..1046: mol_type = other RNA
aggagagtcccgcagtcggcgtccagcggctctgcttgttcgtgtgtgtgtcgttgcaggccttattcaagcttaccatgcgtatccccgtagatgccagcacgagccgccgcttcacgccgccttccaccgcgctgagcccaggcaagatgagcgaggcgttgccgctgggcgccccggacgccggcgctgccctggccggcaagctgaggagcggcgaccgcagcatggtggaggtgctggccgaccacccgggcgagctggtgcgcaccgacagccccaacttcctctgctccgtgctgcctacgcactggcgctgcaacaagaccctgcccatcgctttcaaggtggtggccctaggggatgttccagatggcactctggtcactgtgatggctggcaatgatgaaaactactcggctgagctgagaaatgctaccgcagccatgaagaaccaggttgcaagatttaatgacctcaggtttgtcggtcgaagtggaagagggaaaagtttcactctgaccatcactgtcttcacaaacccaccgcaagtcgccacctaccacagagccatcaaaatcacagtggatgggccccgagaacctcgaagacatcggcagaaactagatgatcagaccaagcccgggagcttgtccttttccgagcggctcagtgaactggagcagctgcggcgcacagccatgagggtcagcccacaccacccagcccccacgcccaaccctcgtgcctccctgaaccactccactgcctttaaccctcagcctcagagtcagatgcaggaggtgggcttctgccacgtcgcccaggtggggctgaagctcctgggctgaggactagtccctgttcccagagcccacttttttttctttttttgaaataaaatagcctgtctttcagatctcaaaggctcttttcagagccaccaaaaaaaaaaaaaaaaaaaaaaaaaaaaaaaaaaaaaaaaaaaaaaaaaaaaaaaaaaaaaaaaaaaaaaaaaaaaaaaaaaaaaaaaaaaaaaaaaaaaa

SEQ ID NO: 816 - RNA, 2750 nt, synthetic construct
  misc_feature 1..2750: note = Artificial____RUNX1(1-241)_V_RUNX1T1b(22-604) mRNA wt mod
  source 1..2750: mol_type = other RNA
aggagagtcccgcagtcggcgtccagcggctctgcttgttcgtgtgtgtgtcgttgcaggccttattcaagcttaccatgcgtatccccgtagatgccagcacgagccgccgcttcacgccgccttccaccgcgctgagcccaggcaagatgagcgaggcgttgccgctgggcgccccggacgccggcgctgccctggccggcaagctgaggagcggcgaccgcagcatggtggaggtgctggccgaccacccgggcgagctggtgcgcaccgacagccccaacttcctctgctccgtgctgcctacgcactggcgctgcaacaagaccctgcccatcgctttcaaggtggtggccctaggggatgttccagatggcactctggtcactgtgatggctggcaatgatgaaaactactcggctgagctgagaaatgctaccgcagccatgaagaaccaggttgcaagatttaatgacctcaggtttgtcggtcgaagtggaagagggaaaagtttcactctgaccatcactgtcttcacaaacccaccgcaagtcgccacctaccacagagccatcaaaatcacagtggatgggccccgagaacctcgaagacatcggcagaaactagatgatcagaccaagcccgggagcttgtccttttccgagcggctcagtgaactggagcagctgcggcgcacagccatgagggtcagcccacaccacccagcccccacgcccaaccctcgtgcctccctgaaccactccactgcctttaaccctcagcctcagagtcagatgcaggtgggtcctgagaaaagggtgccagcgatgcctggatcgcctgtggaagtgaagatacagtccagatcctcacctcccaccatgccacccctcccaccaataaatcctggaggaccgaggccagtgtccttcactcctactgcattaagcaatggcatcaaccattctcctcctaccctgaatggtgccccatcaccgccacagagattcagcaatggtcctgcctcctccacatcatctgcactcacaaatcagcaattgccagccacttgtggtgctcgacaactcagcaagttgaaacgctttcttaccactctgcaacagtttggcaatgacatctcccctgagattggggagaaggtgcggactcttgttcttgcactggtgaactcaacagtgacaattgaggagttccactgtaagctccaagaagccacaaactttccccttcgtccttttgtgattccatttctcaaggccaacctgcccctgctgcagcgggaactgctgcactgcgctcgggcggccaagcagaccccatcccagtacctggctcagcacgaacaccttctgctcaacacaagcattgcatcgcctgctgactcgtcagagttgctcatggaggtgcacggaaatgggaagaggcccagtccagagaggagagaagagaatagttttgatagagacacaattgctcctgagcctcctgccaagagagtatgtaccatcagccctgctcctcggcacagtcctgctctcactgtgcccctcatgaatcccgggggccaattccatcctacccctccacctcttcagcattacaccttagaggatattgcaacttctcacctgtatcgggaacccaacaagatgctagagcatcgagaagttcgtgatagacaccacagtcttggtctaaatggaggctatcaagatgagttggtagatcatcgtttgacagaaagggaatgggctgatgaatggaaacatcttgaccatgcgctgaattgcattatggaaatggtagagaaaacaaggcgctctatggcagttctgcggcgctgtcaggaatcagatcgtgaagaactcaactactggaaaagacggtacaatgaaaacacagagctgaggaaaacggggaccgagttggtctccaggcagcacagccctgggagtgcagattctctcagcaatgattctcagagagagttcaacagcaggccaggtacaggatacgtacctgtggagttttggaagaaaacagaagaagctgtgaataaggtgaaaattcaggccatgtcagaagtacagaaggccgtcgctgaggcagagcagaaagcctttgaagtgattgcaacagagagagcacgaatggagcaaaccatagcggatgtcaagcggcaggccgcagaggatgctttcctcgtcatcaatgagcaagaggagtccacggagaactgctggaactgtggccgcaaagccagcgagacatgcagtggctgcaatatcgcgcgatactgtggctctttctgccagcacaaggactgggagcggcaccaccgcctctgtggtcagaacctgcatggccagagcccccacggccagggccggccgctgcttcctgtaggcaggggctcctctgccaggtccgccgactgcagcgtgcccagcccagccctcgacaagacctcggcaaccacatcgcgttcctcaacacctgcttctgtgacagctatcgacaccaacggactctgaggactagtccctgttcccagagcccacttttttttctttttttgaaataaaatagcctgtctttcagatctcaaaggctcttttcagagccaccaaaaaaaaaaaaaaaaaaaaaaaaaaaaaaaaaaaaaaaaaaaaaaaaaaaaaaaaaaaaaaaaaaaaaaaaaaaaaaaaaaaaaaaaaaaaaaaaaaaaa

SEQ ID NO: 817 - RNA, 2750 nt, synthetic construct
  misc_feature 1..2750: note = Artificial____RUNX1(1-241)_I_RUNX1T1b(22-604) mRNA wt mod
  source 1..2750: mol_type = other RNA
aggagagtcccgcagtcggcgtccagcggctctgcttgttcgtgtgtgtgtcgttgcaggccttattcaagcttaccatgcgtatccccgtagatgccagcacgagccgccgcttcacgccgccttccaccgcgctgagcccaggcaagatgagcgaggcgttgccgctgggcgccccggacgccggcgctgccctggccggcaagctgaggagcggcgaccgcagcatggtggaggtgctggccgaccacccgggcgagctggtgcgcaccgacagccccaacttcctctgctccgtgctgcctacgcactggcgctgcaacaagaccctgcccatcgctttcaaggtggtggccctaggggatgttccagatggcactctggtcactgtgatggctggcaatgatgaaaactactcggctgagctgagaaatgctaccgcagccatgaagaaccaggttgcaagatttaatgacctcaggtttgtcggtcgaagtggaagagggaaaagtttcactctgaccatcactgtcttcacaaacccaccgcaagtcgccacctaccacagagccatcaaaatcacagtggatgggccccgagaacctcgaagacatcggcagaaactagatgatcagaccaagcccgggagcttgtccttttccgagcggctcagtgaactggagcagctgcggcgcacagccatgagggtcagcccacaccacccagcccccacgcccaaccctcgtgcctccctgaaccactccactgcctttaaccctcagcctcagagtcagatgcagatcggtcctgagaaaagggtgccagcgatgcctggatcgcctgtggaagtgaagatacagtccagatcctcacctcccaccatgccacccctcccaccaataaatcctggaggaccgaggccagtgtccttcactcctactgcattaagcaatggcatcaaccattctcctcctaccctgaatggtgccccatcaccgccacagagattcagcaatggtcctgcctcctccacatcatctgcactcacaaatcagcaattgccagccacttgtggtgctcgacaactcagcaagttgaaacgctttcttaccactctgcaacagtttggcaatgacatctcccctgagattggggagaaggtgcggactcttgttcttgcactggtgaactcaacagtgacaattgaggagttccactgtaagctccaagaagccacaaactttccccttcgtccttttgtgattccatttctcaaggccaacctgcccctgctgcagcgggaactgctgcactgcgctcgggcggccaagcagaccccatcccagtacctggctcagcacgaacaccttctgctcaacacaagcattgcatcgcctgctgactcgtcagagttgctcatggaggtgcacggaaatgggaagaggcccagtccagagaggagagaagagaatagttttgatagagacacaattgctcctgagcctcctgccaagagagtatgtaccatcagccctgctcctcggcacagtcctgctctcactgtgcccctcatgaatcccgggggccaattccatcctacccctccacctcttcagcattacaccttagaggatattgcaacttctcacctgtatcgggaacccaacaagatgctagagcatcgagaagttcgtgatagacaccacagtcttggtctaaatggaggctatcaagatgagttggtagatcatcgtttgacagaaagggaatgggctgatgaatggaaacatcttgaccatgcgctgaattgcattatggaaatggtagagaaaacaaggcgctctatggcagttctgcggcgctgtcaggaatcagatcgtgaagaactcaactactggaaaagacggtacaatgaaaacacagagctgaggaaaacggggaccgagttggtctccaggcagcacagccctgggagtgcagattctctcagcaatgattctcagagagagttcaacagcaggccaggtacaggatacgtacctgtggagttttggaagaaaacagaagaagctgtgaataaggtgaaaattcaggccatgtcagaagtacagaaggccgtcgctgaggcagagcagaaagcctttgaagtgattgcaacagagagagcacgaatggagcaaaccatagcggatgtcaagcggcaggccgcagaggatgctttcctcgtcatcaatgagcaagaggagtccacggagaactgctggaactgtggccgcaaagccagcgagacatgcagtggctgcaatatcgcgcgatactgtggctctttctgccagcacaaggactgggagcggcaccaccgcctctgtggtcagaacctgcatggccagagcccccacggccagggccggccgctgcttcctgtaggcaggggctcctctgccaggtccgccgactgcagcgtgcccagcccagccctcgacaagacctcggcaaccacatcgcgttcctcaacacctgcttctgtgacagctatcgacaccaacggactctgaggactagtccctgttcccagagcccacttttttttctttttttgaaataaaatagcctgtctttcagatctcaaaggctcttttcagagccaccaaaaaaaaaaaaaaaaaaaaaaaaaaaaaaaaaaaaaaaaaaaaaaaaaaaaaaaaaaaaaaaaaaaaaaaaaaaaaaaaaaaaaaaaaaaaaaaaaaaaa

SEQ ID NO: 818 - RNA, 1634 nt, synthetic construct
  misc_feature 1..1634: note = Homo sapiens__Q01196-1__RUNX1(K83E_R174Q) mRNA opt1
  source 1..1634: mol_type = other RNA
aggagagtcccgcagtcggcgtccagcggctctgcttgttcgtgtgtgtgtcgttgcaggccttattcaagcttaccatgcgcatccccgtggacgccagcacctcccggcgcttcaccccgcccagcacggccctgtcccccggcaagatgagcgaggcgctccccctgggggccccggacgccggcgccgccctggcggggaagctccggtccggcgaccgcagcatggtcgaggtgctggccgaccaccccggggagctggtgcggaccgactcccccaacttcctctgcagcgtcctgcccacccactggcgctgcaacgagaccctgccgatcgccttcaaggtggtggccctcggcgacgtccccgacggcacgctggtgaccgtgatggcggggaacgacgagaactactccgccgagctgcggaacgccaccgccgccatgaagaaccaggtcgcgcgcttcaacgacctccggttcgtgggccgcagcgggcggggcaagtccttcaccctgacgatcaccgtgttcaccaacccgccccaggtcgccacctaccaccgcgccatcaagatcacggtggacgggccccaggagccccgccggcaccgccagaagctggacgaccagaccaagcccggcagcctctccttcagcgagcggctgtccgagctggagcagctccgccggaccgccatgcgcgtgagcccccaccacccggcccccacccccaacccccgggcgtccctgaaccacagcacggccttcaacccgcagccccagtcccagatgcaggacacccgccagatccagcccagcccgccctggagctacgaccagtcctaccagtacctgggcagcatcgcctcccccagcgtccaccccgccacccccatctccccggggcgcgccagcggcatgaccacgctctccgcggagctgagctcccggctgagcaccgcccccgacctcaccgccttctccgacccccgccagttcccggccctgcccagcatctccgacccccggatgcactaccccggggccttcacctacagcccgacgcccgtgacctccggcatcggcatcgggatgagcgcgatgggctccgccacccgctaccacacctacctgcccccgccctaccccgggagctcccaggcccagggcgggcccttccaggccagcagcccctcctaccacctctactacggcgcgagcgccggctcctaccagttcagcatggtcgggggcgagcggtccccgccccgcatcctgccgccctgcacgaacgccagcaccgggtccgccctgctcaaccccagcctgcccaaccagtccgacgtggtggaggccgagggcagccactccaacagccccaccaacatggcgccctccgcccggctggaggaggccgtgtggcgcccgtactgaggactagtccctgttcccagagcccacttttttttctttttttgaaataaaatagcctgtctttcagatctcaaaggctcttttcagagccaccaaaaaaaaaaaaaaaaaaaaaaaaaaaaaaaaaaaaaaaaaaaaaaaaaaaaaaaaaaaaaaaaaaaaaaaaaaaaaaaaaaaaaaaaaaaaaaaaaaaaa

SEQ ID NO: 819 - RNA, 2108 nt, synthetic construct
  misc_feature 1..2108: note = Homo sapiens____CBFbeta(1-165)_SMMHC(1527-1972) mRNA opt1
  source 1..2108: mol_type = other RNA
aggagagtcccgcagtcggcgtccagcggctctgcttgttcgtgtgtgtgtcgttgcaggccttattcaagcttaccatgccccgcgtggtcccggaccagcggagcaagttcgagaacgaggagttcttccgcaagctgtcccgggagtgcgagatcaagtacaccggcttccgcgaccggccccacgaggagcgccaggcccggttccagaacgcctgccgcgacgggcggagcgagatcgcgttcgtggccaccggcacgaacctctccctgcagttcttccccgccagctggcagggggagcagcgccagaccccctcccgggagtacgtggacctggagcgcgaggccggcaaggtctacctcaaggccccgatgatcctgaacggggtgtgcgtgatctggaagggctggatcgacctgcagcggctcgacggcatggggtgcctggagttcgacgaggagcgcgcgcagcaggaggacgccctggcccagcaggccttcgaggaggcgcggcgccggacccgcgagttcgaggaccgggaccgcagccaccgggaggagatggaggtgcacgagctggagaagtccaagcgcgccctcgagacccagatggaggagatgaagacccagctggaggagctggaggacgagctccaggccacggaggacgcgaagctgcggctggaggtcaacatgcaggccctcaagggccagttcgagcgcgacctgcaggcccgggacgagcagaacgaggagaagcgccggcagctgcagcgccagctccacgagtacgagaccgagctggaggacgagcggaagcagcgcgccctggccgcggccgccaagaagaagctcgagggggacctgaaggacctggagctccaggccgacagcgcgatcaagggccgggaggaggccatcaagcagctgcgcaagctgcaggcccagatgaaggacttccagcgggagctcgaggacgcccgcgccagccgggacgagatcttcgcgaccgccaaggagaacgagaagaaggccaagtccctggaggccgacctgatgcagctccaggaggacctggccgcggccgagcgcgcccggaagcaggccgacctggagaaggaggagctcgccgaggagctggcgagctccctgagcgggcgcaacgccctccaggacgagaagcggcgcctggaggcccggatcgcccagctggaggaggagctcgaggaggagcagggcaacatggaggccatgtccgaccgcgtgcggaaggcgacccagcaggccgagcagctgagcaacgagctggccacggagcgctccaccgcccagaagaacgagagcgcgcgccagcagctcgagcggcagaacaaggagctgcgctccaagctgcacgagatggagggggccgtgaagtccaagttcaagagcaccatcgccgccctcgaggccaagatcgcgcagctggaggagcaggtcgagcaggaggcccgggagaagcaggccgccaccaagagcctgaagcagaaggacaagaagctcaaggagatcctgctccaggtggaggacgagcgcaagatggccgagcagtacaaggagcaggcggagaagggcaacgcccgggtgaagcagctgaagcgccagctggaggaggccgaggaggagtcccagcggatcaacgccaaccgccggaagctgcagcgcgagctcgacgaggccacggagagcaacgaggcgatgggccgggaggtcaacgccctgaagtccaagctgcgccgggggaacgagaccagcttcgtgccctcccgccggagcggcgggcgccgggtgatcgagaacgccgacggcagcgaggaggagaccgacacccgcgacgccgacttcaacgggacgaaggcgtccgagtgaggactagtccctgttcccagagcccacttttttttctttttttgaaataaaatagcctgtctttcagatctcaaaggctcttttcagagccaccaaaaaaaaaaaaaaaaaaaaaaaaaaaaaaaaaaaaaaaaaaaaaaaaaaaaaaaaaaaaaaaaaaaaaaaaaaaaaaaaaaaaaaaaaaaaaaaaaaaaa

SEQ ID NO: 820 - RNA, 1823 nt, synthetic construct
  misc_feature 1..1823: note = Artificial____CBFbeta(1-165)_SMMHC(1527-1877) mRNA opt1
  source 1..1823: mol_type = other RNA
aggagagtcccgcagtcggcgtccagcggctctgcttgttcgtgtgtgtgtcgttgcaggccttattcaagcttaccatgccccgcgtggtcccggaccagcggagcaagttcgagaacgaggagttcttccgcaagctgtcccgggagtgcgagatcaagtacaccggcttccgcgaccggccccacgaggagcgccaggcccggttccagaacgcctgccgcgacgggcggagcgagatcgcgttcgtggccaccggcacgaacctctccctgcagttcttccccgccagctggcagggggagcagcgccagaccccctcccgggagtacgtggacctggagcgcgaggccggcaaggtctacctcaaggccccgatgatcctgaacggggtgtgcgtgatctggaagggctggatcgacctgcagcggctcgacggcatggggtgcctggagttcgacgaggagcgcgcgcagcaggaggacgccctggcccagcaggccttcgaggaggcgcggcgccggacccgcgagttcgaggaccgggaccgcagccaccgggaggagatggaggtgcacgagctggagaagtccaagcgcgccctcgagacccagatggaggagatgaagacccagctggaggagctggaggacgagctccaggccacggaggacgcgaagctgcggctggaggtcaacatgcaggccctcaagggccagttcgagcgcgacctgcaggcccgggacgagcagaacgaggagaagcgccggcagctgcagcgccagctccacgagtacgagaccgagctggaggacgagcggaagcagcgcgccctggccgcggccgccaagaagaagctcgagggggacctgaaggacctggagctccaggccgacagcgcgatcaagggccgggaggaggccatcaagcagctgcgcaagctgcaggcccagatgaaggacttccagcgggagctcgaggacgcccgcgccagccgggacgagatcttcgcgaccgccaaggagaacgagaagaaggccaagtccctggaggccgacctgatgcagctccaggaggacctggccgcggccgagcgcgcccggaagcaggccgacctggagaaggaggagctcgccgaggagctggcgagctccctgagcgggcgcaacgccctccaggacgagaagcggcgcctggaggcccggatcgcccagctggaggaggagctcgaggaggagcagggcaacatggaggccatgtccgaccgcgtgcggaaggcgacccagcaggccgagcagctgagcaacgagctggccacggagcgctccaccgcccagaagaacgagagcgcgcgccagcagctcgagcggcagaacaaggagctgcgctccaagctgcacgagatggagggggccgtgaagtccaagttcaagagcaccatcgccgccctcgaggccaagatcgcgcagctggaggagcaggtcgagcaggaggcccgggagaagcaggccgccaccaagagcctgaagcagaaggacaagaagctcaaggagatcctgctccaggtggaggacgagcgcaagatggccgagcagtacaaggagcaggcggagaagggcaacgcctgaggactagtccctgttcccagagcccacttttttttctttttttgaaataaaatagcctgtctttcagatctcaaaggctcttttcagagccaccaaaaaaaaaaaaaaaaaaaaaaaaaaaaaaaaaaaaaaaaaaaaaaaaaaaaaaaaaaaaaaaaaaaaaaaaaaaaaaaaaaaaaaaaaaaaaaaaaaaaa

SEQ ID NO: 821 - RNA, 884 nt, synthetic construct
  misc_feature 1..884: note = Artificial____CBFbeta(1-165)_Linker_Lifeact mRNA opt1
  source 1..884: mol_type = other RNA
aggagagtcccgcagtcggcgtccagcggctctgcttgttcgtgtgtgtgtcgttgcaggccttattcaagcttaccatgccccgcgtggtcccggaccagcggagcaagttcgagaacgaggagttcttccgcaagctgtcccgggagtgcgagatcaagtacaccggcttccgcgaccggccccacgaggagcgccaggcccggttccagaacgcctgccgcgacgggcggagcgagatcgcgttcgtggccaccggcacgaacctctccctgcagttcttccccgccagctggcagggggagcagcgccagaccccctcccgggagtacgtggacctggagcgcgaggccggcaaggtctacctcaaggccccgatgatcctgaacggggtgtgcgtgatctggaagggctggatcgacctgcagcggctcgacggcatggggtgcctggagttcgacgaggagcgcgcgcagcaggaggacgccctggcccagcaggccttcgaggaggcgcggcgccggacccgcgagttcgaggaccgggaccgcagccaccgggaggagatggagggcgggagcggcgggtccggcgggagcggcggctccgggggcgggggcgtggccgacctgatcaagaagttcgagagcatctccaaggaggagggggacccgcccgtcgccacctgaggactagtccctgttcccagagcccacttttttttctttttttgaaataaaatagcctgtctttcagatctcaaaggctcttttcagagccaccaaaaaaaaaaaaaaaaaaaaaaaaaaaaaaaaaaaaaaaaaaaaaaaaaaaaaaaaaaaaaaaaaaaaaaaaaaaaaaaaaaaaaaaaaaaaaaaaaaaaa

SEQ ID NO: 822 - RNA, 851 nt, synthetic construct
  misc_feature 1..851: note = Artificial____CBFbeta(1-165)_HIF1alpha(549-575) mRNA opt1
  source 1..851: mol_type = other RNA
aggagagtcccgcagtcggcgtccagcggctctgcttgttcgtgtgtgtgtcgttgcaggccttattcaagcttaccatgccccgcgtggtcccggaccagcggagcaagttcgagaacgaggagttcttccgcaagctgtcccgggagtgcgagatcaagtacaccggcttccgcgaccggccccacgaggagcgccaggcccggttccagaacgcctgccgcgacgggcggagcgagatcgcgttcgtggccaccggcacgaacctctccctgcagttcttccccgccagctggcagggggagcagcgccagaccccctcccgggagtacgtggacctggagcgcgaggccggcaaggtctacctcaaggccccgatgatcctgaacggggtgtgcgtgatctggaagggctggatcgacctgcagcggctcgacggcatggggtgcctggagttcgacgaggagcgcgcgcagcaggaggacgccctggcccagcaggccttcgaggaggcgcggcgccggacccgcgagttcgaggaccgggaccgcagccaccgggaggagatggagcccttcagcacccaggacaccgacctggacctcgagatgctggccccgtacatccccatggacgacgacttccagctgcgctgaggactagtccctgttcccagagcccacttttttttctttttttgaaataaaatagcctgtctttcagatctcaaaggctcttttcagagccaccaaaaaaaaaaaaaaaaaaaaaaaaaaaaaaaaaaaaaaaaaaaaaaaaaaaaaaaaaaaaaaaaaaaaaaaaaaaaaaaaaaaaaaaaaaaaaaaaaaaaa

SEQ ID NO: 823 - RNA, 896 nt, synthetic construct
  misc_feature 1..896: note Artificial____CBFbeta(1-165)_Linker_HIF1alpha(549-575) mRNA opt1
  source 1..896: mol_type = other RNA
aggagagtcccgcagtcggcgtccagcggctctgcttgttcgtgtgtgtgtcgttgcaggccttattcaagcttaccatgccccgcgtggtcccggaccagcggagcaagttcgagaacgaggagttcttccgcaagctgtcccgggagtgcgagatcaagtacaccggcttccgcgaccggccccacgaggagcgccaggcccggttccagaacgcctgccgcgacgggcggagcgagatcgcgttcgtggccaccggcacgaacctctccctgcagttcttccccgccagctggcagggggagcagcgccagaccccctcccgggagtacgtggacctggagcgcgaggccggcaaggtctacctcaaggccccgatgatcctgaacggggtgtgcgtgatctggaagggctggatcgacctgcagcggctcgacggcatggggtgcctggagttcgacgaggagcgcgcgcagcaggaggacgccctggcccagcaggccttcgaggaggcgcggcgccggacccgcgagttcgaggaccgggaccgcagccaccgggaggagatggagggcgggagcggcgggtccggcgggagcggcggctccgggggcgggcccttcagcacccaggacaccgacctggacctcgagatgctggccccgtacatccccatggacgacgacttccagctgcgctgaggactagtccctgttcccagagcccacttttttttctttttttgaaataaaatagcctgtctttcagatctcaaaggctcttttcagagccaccaaaaaaaaaaaaaaaaaaaaaaaaaaaaaaaaaaaaaaaaaaaaaaaaaaaaaaaaaaaaaaaaaaaaaaaaaaaaaaaaaaaaaaaaaaaaaaaaaaaaa

SEQ ID NO: 824 - RNA, 2531 nt, synthetic construct
  misc_feature 1..2531: note = Artificial____RUNX1(1-177)_N_RUNX1T1a(31-604) mRNA opt1
  source 1..2531: mol_type = other RNA
aggagagtcccgcagtcggcgtccagcggctctgcttgttcgtgtgtgtgtcgttgcaggccttattcaagcttaccatgcgcatccccgtggacgccagcacctcccggcgcttcaccccgcccagcacggccctgtcccccggcaagatgagcgaggcgctccccctgggggccccggacgccggcgccgccctggcggggaagctccggtccggcgaccgcagcatggtcgaggtgctggccgaccaccccggggagctggtgcggaccgactcccccaacttcctctgcagcgtcctgcccacccactggcgctgcaacaagaccctgccgatcgccttcaaggtggtggccctcggcgacgtccccgacggcacgctggtgaccgtgatggcggggaacgacgagaactactccgccgagctgcggaacgccaccgccgccatgaagaaccaggtcgcgcgcttcaacgacctccggttcgtgggccgcagcgggcggggcaagtccttcaccctgacgatcaccgtgttcaccaacccgccccaggtcgccacctaccaccgcgccatcaagatcacggtggacgggccccgggagccccgcaaccggaccgagaagcacagcacgatgcccgactccccggtggacgtgaagacccagagccgcctgaccccgcccaccatgcccccgccgcccacgacccagggcgcgccccggacctccagcttcacccccacgaccctgaccaacgggacctcccacagccccacggccctcaacggcgccccctccccgcccaacgggttcagcaacggcccctccagctccagctccagctccctggccaaccagcagctgccgcccgcctgcggcgcccgccagctcagcaagctgaagcggttcctgaccaccctccagcagttcgggaacgacatctcccccgagatcggcgagcgcgtccggaccctggtgctggggctcgtgaacagcacgctgaccatcgaggagttccacagcaagctgcaggaggcgaccaacttccccctccgccccttcgtcatccccttcctgaaggccaacctgcccctcctgcagcgggagctgctccactgcgcccgcctggccaagcagaaccccgcgcagtacctggcccagcacgagcagctcctgctggacgcctccaccacgagccccgtggactccagcgagctcctgctggacgtgaacgagaacggcaagcggcgcacccccgaccggaccaaggagaacgggttcgaccgcgagccgctccactccgagcaccccagcaagcggccctgcaccatctcccccggccagcgctacagcccgaacaacggcctgtcctaccagcccaacgggctgccccacccgacgcccccgccgccccagcactaccggctcgacgacatggccatcgcccaccactaccgcgacagctaccggcacccctcccaccgcgacctgcgcgaccggaaccgccccatgggcctgcacgggacccggcaggaggagatgatcgaccaccgcctcaccgaccgggagtgggcggaggagtggaagcacctggaccacctcctgaactgcatcatggacatggtcgagaagacccgccggagcctgacggtgctgcgccggtgccaggaggccgaccgcgaggagctcaactactggatccggcgctactccgacgccgaggacctgaagaagggcggcgggagctccagctcccacagccggcagcagtcccccgtgaaccccgaccccgtcgccctggacgcccaccgcgagttcctccaccggcccgcgagcggctacgtgcccgaggagatctggaagaaggccgaggaggccgtgaacgaggtcaagcgccaggccatgaccgagctgcagaaggccgtgagcgaggcggagcggaaggcccacgacatgatcaccaccgagcgcgccaagatggagcggacggtggccgaggccaagcgccaggcggccgaggacgccctggccgtcatcaaccagcaggaggactccagcgagtcctgctggaactgcgggcgcaaggcgagcgagacctgctccggctgcaacaccgcccggtactgcgggagcttctgccagcacaaggactgggagaagcaccaccacatctgcggccagaccctgcaggcccagcagcagggcgacacgccggccgtgtccagctccgtgacccccaacagcggggccggctcccccatggacacgcccccggcggccacgccccgcagcaccacccccgggaccccctccaccatcgagaccaccccgcggtgaggactagtccctgttcccagagcccacttttttttctttttttgaaataaaatagcctgtctttcagatctcaaaggctcttttcagagccaccaaaaaaaaaaaaaaaaaaaaaaaaaaaaaaaaaaaaaaaaaaaaaaaaaaaaaaaaaaaaaaaaaaaaaaaaaaaaaaaaaaaaaaaaaaaaaaaaaaaaa

SEQ ID NO: 825 - RNA, 1046 nt, synthetic construct
  misc_feature 1..1046: note = Artificial____RUNX1(1-241)_RUNX1T1b(short) mRNA opt1
  source 1..1046: mol_type = other RNA
aggagagtcccgcagtcggcgtccagcggctctgcttgttcgtgtgtgtgtcgttgcaggccttattcaagcttaccatgcgcatccccgtggacgccagcacctcccggcgcttcaccccgcccagcacggccctgtcccccggcaagatgagcgaggcgctccccctgggggccccggacgccggcgccgccctggcggggaagctccggtccggcgaccgcagcatggtcgaggtgctggccgaccaccccggggagctggtgcggaccgactcccccaacttcctctgcagcgtcctgcccacccactggcgctgcaacaagaccctgccgatcgccttcaaggtggtggccctcggcgacgtccccgacggcacgctggtgaccgtgatggcggggaacgacgagaactactccgccgagctgcggaacgccaccgccgccatgaagaaccaggtcgcgcgcttcaacgacctccggttcgtgggccgcagcgggcggggcaagtccttcaccctgacgatcaccgtgttcaccaacccgccccaggtcgccacctaccaccgcgccatcaagatcacggtggacgggccccgggagccccgccggcaccgccagaagctggacgaccagaccaagcccggcagcctctccttcagcgagcggctgtccgagctggagcagctccgccggaccgccatgcgcgtgagcccccaccacccggcccccacccccaacccccgggcgtccctgaaccacagcacggccttcaacccgcagccccagtcccagatgcaggaggtgggcttctgccacgtcgcccaggtggggctgaagctcctgggctgaggactagtccctgttcccagagcccacttttttttctttttttgaaataaaatagcctgtctttcagatctcaaaggctcttttcagagccaccaaaaaaaaaaaaaaaaaaaaaaaaaaaaaaaaaaaaaaaaaaaaaaaaaaaaaaaaaaaaaaaaaaaaaaaaaaaaaaaaaaaaaaaaaaaaaaaaaaaaa

SEQ ID NO: 826 - RNA, 2750 nt, synthetic construct
  misc_feature 1..2750: note = Artificial____RUNX1(1-241)_V_RUNX1T1b(22-604) mRNA opt1
  source 1..2750: mol_type = other RNA
aggagagtcccgcagtcggcgtccagcggctctgcttgttcgtgtgtgtgtcgttgcaggccttattcaagcttaccatgcgcatccccgtggacgccagcacctcccggcgcttcaccccgcccagcacggccctgtcccccggcaagatgagcgaggcgctccccctgggggccccggacgccggcgccgccctggcggggaagctccggtccggcgaccgcagcatggtcgaggtgctggccgaccaccccggggagctggtgcggaccgactcccccaacttcctctgcagcgtcctgcccacccactggcgctgcaacaagaccctgccgatcgccttcaaggtggtggccctcggcgacgtccccgacggcacgctggtgaccgtgatggcggggaacgacgagaactactccgccgagctgcggaacgccaccgccgccatgaagaaccaggtcgcgcgcttcaacgacctccggttcgtgggccgcagcgggcggggcaagtccttcaccctgacgatcaccgtgttcaccaacccgccccaggtcgccacctaccaccgcgccatcaagatcacggtggacgggccccgggagccccgccggcaccgccagaagctggacgaccagaccaagcccggcagcctctccttcagcgagcggctgtccgagctggagcagctccgccggaccgccatgcgcgtgagcccccaccacccggcccccacccccaacccccgggcgtccctgaaccacagcacggccttcaacccgcagccccagtcccagatgcaggtggggcccgagaagcgggtgccggcgatgcccggcagccccgtggaggtcaagatccagtcccgcagctccccgcccaccatgccgcccctgccgcccatcaaccccgggggcccccggcccgtgagcttcacccccacggccctgtccaacgggatcaaccactccccgcccaccctcaacggcgcccccagcccgccccagcgcttcagcaacggccccgcctccagcacctccagcgccctgaccaaccagcagctgcccgcgacgtgcggggcccggcagctctccaagctgaagcgcttcctgaccaccctccagcagttcggcaacgacatcagccccgagatcggggagaaggtgcggaccctggtcctggccctcgtgaactccacggtgaccatcgaggagttccactgcaagctgcaggaggccaccaacttccccctgcgccccttcgtcatccccttcctcaaggcgaacctgccgctgctccagcgggagctgctgcactgcgcccgcgccgccaagcagacccccagccagtacctcgcccagcacgagcacctcctgctgaacacgtccatcgcgagccccgccgacagctccgagctgctgatggaggtgcacggcaacgggaagcggcccagcccggagcgccgggaggagaactccttcgaccgcgacaccatcgcccccgagcccccggccaagcgggtgtgcaccatcagccccgcgccccgccactcccccgccctcaccgtcccgctgatgaaccccggcggccagttccaccccacgcccccgcccctgcagcactacaccctcgaggacatcgccaccagccacctgtaccgggagcccaacaagatgctggagcaccgcgaggtgcgggaccgccaccactccctcgggctgaacggcgggtaccaggacgagctggtggaccaccggctcaccgagcgcgagtgggccgacgagtggaagcacctggaccacgccctgaactgcatcatggagatggtcgagaagacgcgccggagcatggccgtgctccgccggtgccaggagtccgaccgcgaggagctgaactactggaagcggcgctacaacgagaacaccgagctgcggaagaccggcaccgagctcgtgagccgccagcactcccccggcagcgcggactccctgagcaacgactcccagcgggagttcaacagccgcccggggacgggctacgtccccgtggagttctggaagaagaccgaggaggccgtgaacaaggtcaagatccaggccatgtccgaggtgcagaaggccgtggccgaggcggagcagaaggccttcgaggtcatcgccaccgagcgggcccgcatggagcagaccatcgcggacgtgaagcggcaggccgccgaggacgccttcctggtcatcaacgagcaggaggagagcacggagaactgctggaactgcgggcgcaaggcctccgagacctgcagcggctgcaacatcgcgcggtactgcgggagcttctgccagcacaaggactgggagcgccaccaccggctctgcggccagaacctgcacggccagtccccgcacgggcagggccgccccctgctgcccgtggggcggggcagctccgcccgcagcgccgactgctccgtgcccagccccgccctcgacaagacctccgccaccacgagccgctccagcacccccgcgtccgtcaccgccatcgacaccaacgggctgtgaggactagtccctgttcccagagcccacttttttttctttttttgaaataaaatagcctgtctttcagatctcaaaggctcttttcagagccaccaaaaaaaaaaaaaaaaaaaaaaaaaaaaaaaaaaaaaaaaaaaaaaaaaaaaaaaaaaaaaaaaaaaaaaaaaaaaaaaaaaaaaaaaaaaaaaaaaaaaa

SEQ ID NO: 827 - RNA, 2750 nt, synthetic construct
  misc_feature 1..2750: note = Artificial____RUNX1(1-241)_I_RUNX1T1b(22-604) mRNA opt1
  source 1..2750: mol_type = other RNA
aggagagtcccgcagtcggcgtccagcggctctgcttgttcgtgtgtgtgtcgttgcaggccttattcaagcttaccatgcgcatccccgtggacgccagcacctcccggcgcttcaccccgcccagcacggccctgtcccccggcaagatgagcgaggcgctccccctgggggccccggacgccggcgccgccctggcggggaagctccggtccggcgaccgcagcatggtcgaggtgctggccgaccaccccggggagctggtgcggaccgactcccccaacttcctctgcagcgtcctgcccacccactggcgctgcaacaagaccctgccgatcgccttcaaggtggtggccctcggcgacgtccccgacggcacgctggtgaccgtgatggcggggaacgacgagaactactccgccgagctgcggaacgccaccgccgccatgaagaaccaggtcgcgcgcttcaacgacctccggttcgtgggccgcagcgggcggggcaagtccttcaccctgacgatcaccgtgttcaccaacccgccccaggtcgccacctaccaccgcgccatcaagatcacggtggacgggccccgggagccccgccggcaccgccagaagctggacgaccagaccaagcccggcagcctctccttcagcgagcggctgtccgagctggagcagctccgccggaccgccatgcgcgtgagcccccaccacccggcccccacccccaacccccgggcgtccctgaaccacagcacggccttcaacccgcagccccagtcccagatgcagatcgggcccgagaagcgggtgccggcgatgcccggcagccccgtggaggtcaagatccagtcccgcagctccccgcccaccatgccgcccctgccgcccatcaaccccgggggcccccggcccgtgagcttcacccccacggccctgtccaacgggatcaaccactccccgcccaccctcaacggcgcccccagcccgccccagcgcttcagcaacggccccgcctccagcacctccagcgccctgaccaaccagcagctgcccgcgacgtgcggggcccggcagctctccaagctgaagcgcttcctgaccaccctccagcagttcggcaacgacatcagccccgagatcggggagaaggtgcggaccctggtcctggccctcgtgaactccacggtgaccatcgaggagttccactgcaagctgcaggaggccaccaacttccccctgcgccccttcgtcatccccttcctcaaggcgaacctgccgctgctccagcgggagctgctgcactgcgcccgcgccgccaagcagacccccagccagtacctcgcccagcacgagcacctcctgctgaacacgtccatcgcgagccccgccgacagctccgagctgctgatggaggtgcacggcaacgggaagcggcccagcccggagcgccgggaggagaactccttcgaccgcgacaccatcgcccccgagcccccggccaagcgggtgtgcaccatcagccccgcgccccgccactcccccgccctcaccgtcccgctgatgaaccccggcggccagttccaccccacgcccccgcccctgcagcactacaccctcgaggacatcgccaccagccacctgtaccgggagcccaacaagatgctggagcaccgcgaggtgcgggaccgccaccactccctcgggctgaacggcgggtaccaggacgagctggtggaccaccggctcaccgagcgcgagtgggccgacgagtggaagcacctggaccacgccctgaactgcatcatggagatggtcgagaagacgcgccggagcatggccgtgctccgccggtgccaggagtccgaccgcgaggagctgaactactggaagcggcgctacaacgagaacaccgagctgcggaagaccggcaccgagctcgtgagccgccagcactcccccggcagcgcggactccctgagcaacgactcccagcgggagttcaacagccgcccggggacgggctacgtccccgtggagttctggaagaagaccgaggaggccgtgaacaaggtcaagatccaggccatgtccgaggtgcagaaggccgtggccgaggcggagcagaaggccttcgaggtcatcgccaccgagcgggcccgcatggagcagaccatcgcggacgtgaagcggcaggccgccgaggacgccttcctggtcatcaacgagcaggaggagagcacggagaactgctggaactgcgggcgcaaggcctccgagacctgcagcggctgcaacatcgcgcggtactgcgggagcttctgccagcacaaggactgggagcgccaccaccggctctgcggccagaacctgcacggccagtccccgcacgggcagggccgccccctgctgcccgtggggcggggcagctccgcccgcagcgccgactgctccgtgcccagccccgccctcgacaagacctccgccaccacgagccgctccagcacccccgcgtccgtcaccgccatcgacaccaacgggctgtgaggactagtccctgttcccagagcccacttttttttctttttttgaaataaaatagcctgtctttcagatctcaaaggctcttttcagagccaccaaaaaaaaaaaaaaaaaaaaaaaaaaaaaaaaaaaaaaaaaaaaaaaaaaaaaaaaaaaaaaaaaaaaaaaaaaaaaaaaaaaaaaaaaaaaaaaaaaaaa

SEQ ID NO: 828 - RNA, 1634 nt, synthetic construct
  misc_feature 1..1634: note = Homo sapiens__Q01196-1__RUNX1(K83E_R174Q) mRNA opt1
  source 1..1634: mol_type = other RNA
aggagagtcccgcagtcggcgtccagcggctctgcttgttcgtgtgtgtgtcgttgcaggccttattcaagcttaccatgcgcatccccgtggacgccagcacctcccggcgcttcaccccgcccagcacggccctgtcccccggcaagatgagcgaggcgctccccctgggggccccggacgccggcgccgccctggcggggaagctccggtccggcgaccgcagcatggtcgaggtgctggccgaccaccccggggagctggtgcggaccgactcccccaacttcctctgcagcgtcctgcccacccactggcgctgcaacgagaccctgccgatcgccttcaaggtggtggccctcggcgacgtccccgacggcacgctggtgaccgtgatggcggggaacgacgagaactactccgccgagctgcggaacgccaccgccgccatgaagaaccaggtcgcgcgcttcaacgacctccggttcgtgggccgcagcgggcggggcaagtccttcaccctgacgatcaccgtgttcaccaacccgccccaggtcgccacctaccaccgcgccatcaagatcacggtggacgggccccaggagccccggcgccaccggcagaagctggacgaccagaccaagcccggcagcctctccttcagcgagcgcctgtccgagctggagcagctccggcgcaccgccatgcgggtgagcccccaccacccggcccccacccccaacccccgcgcgtccctgaaccacagcacggccttcaacccgcagccccagtcccagatgcaggacacccggcagatccagcccagcccgccctggagctacgaccagtcctaccagtacctgggcagcatcgcctcccccagcgtccaccccgccacccccatctccccggggcgcgccagcggcatgaccacgctctccgcggagctgagctcccgcctgagcaccgcccccgacctcaccgccttctccgacccccggcagttcccggccctgcccagcatctccgacccccgcatgcactaccccggggccttcacctacagcccgacgcccgtgacctccggcatcggcatcgggatgagcgcgatgggctccgccacccggtaccacacctacctgcccccgccctaccccgggagctcccaggcccagggcgggcccttccaggccagcagcccctcctaccacctctactacggcgcgagcgccggctcctaccagttcagcatggtcgggggcgagcgctccccgccccggatcctgccgccctgcacgaacgccagcaccgggtccgccctgctcaaccccagcctgcccaaccagtccgacgtggtggaggccgagggcagccactccaacagccccaccaacatggcgccctccgcccgcctggaggaggccgtgtggcggccgtactgaggactagtccctgttcccagagcccacttttttttctttttttgaaataaaatagcctgtctttcagatctcaaaggctcttttcagagccaccaaaaaaaaaaaaaaaaaaaaaaaaaaaaaaaaaaaaaaaaaaaaaaaaaaaaaaaaaaaaaaaaaaaaaaaaaaaaaaaaaaaaaaaaaaaaaaaaaaaaa

SEQ ID NO: 829 - RNA, 2108 nt, synthetic construct
  misc_feature 1..2108: note = Homo sapiens____CBFbeta(1-165)_SMMHC(1527-1972) mRNA opt1
  source 1..2108: mol_type = other RNA
aggagagtcccgcagtcggcgtccagcggctctgcttgttcgtgtgtgtgtcgttgcaggccttattcaagcttaccatgccccgcgtggtcccggaccagcggagcaagttcgagaacgaggagttcttccgcaagctgtcccgggagtgcgagatcaagtacaccggcttccgcgaccggccccacgaggagcgccaggcccggttccagaacgcctgccgcgacgggcggagcgagatcgcgttcgtggccaccggcacgaacctctccctgcagttcttccccgccagctggcagggggagcagcgccagaccccctcccgggagtacgtggacctggagcgcgaggccggcaaggtctacctcaaggccccgatgatcctgaacggggtgtgcgtgatctggaagggctggatcgacctgcagcggctcgacggcatggggtgcctggagttcgacgaggagcgcgcgcagcaggaggacgccctggcccagcaggccttcgaggaggcgcggcgccggacccgcgagttcgaggaccgggaccgcagccaccgggaggagatggaggtccacgagctcgagaagtccaagcgcgccctggagacccagatggaggagatgaagacgcagctggaggagctcgaggacgagctgcaggccaccgaggacgccaagctgcgcctcgaggtgaacatgcaggccctgaagggccagttcgagcgggacctgcaggcgcgcgacgagcagaacgaggagaagcggcgccagctccagcggcagctgcacgagtacgagaccgagctggaggacgagcgcaagcagcgggccctcgccgccgccgcgaagaagaagctggagggggacctgaaggacctcgagctgcaggccgacagcgccatcaagggccgcgaggaggccatcaagcagctgcggaagctccaggcccagatgaaggacttccagcgcgagctggaggacgcgcgggcctcccgcgacgagatcttcgccaccgccaaggagaacgagaagaaggccaagagcctggaggcggacctcatgcagctgcaggaggacctggccgccgccgagcgggcgcgcaagcaggccgacctcgagaaggaggagctggccgaggagctggcctccagcctctccgggcggaacgccctgcaggacgagaagcgccggctggaggcgcgcatcgcccagctcgaggaggagctggaggaggagcagggcaacatggaggccatgagcgaccgggtgcgcaaggccacgcagcaggccgagcagctgtccaacgagctcgcgaccgagcgcagcaccgcccagaagaacgagtccgcccggcagcagctggagcgccagaacaaggagctgcggagcaagctccacgagatggagggcgccgtcaagtccaagttcaagagcaccatcgccgcgctggaggccaagatcgcccagctggaggagcaggtcgagcaggaggcccgcgagaagcaggcggccaccaagagcctgaagcagaaggacaagaagctcaaggagatcctgctccaggtggaggacgagcggaagatggccgagcagtacaaggagcaggccgagaaggggaacgcccgcgtgaagcagctgaagcggcagctggaggaggcggaggaggagtcccagcgcatcaacgccaaccggcgcaagctgcagcgggagctcgacgaggccacggagagcaacgaggccatgggccgcgaggtgaacgccctgaagtccaagctgcggcgcgggaacgagaccagcttcgtgccctcccggcgcagcggcggccggcgcgtcatcgagaacgcggacgggtccgaggaggagaccgacacgcgggacgccgacttcaacggcaccaaggccagcgagtgaggactagtccctgttcccagagcccacttttttttctttttttgaaataaaatagcctgtctttcagatctcaaaggctcttttcagagccaccaaaaaaaaaaaaaaaaaaaaaaaaaaaaaaaaaaaaaaaaaaaaaaaaaaaaaaaaaaaaaaaaaaaaaaaaaaaaaaaaaaaaaaaaaaaaaaaaaaaaa

SEQ ID NO: 830 - RNA, 1823 nt, synthetic construct
  misc_feature 1..1823: note = Artificial____CBFbeta(1-165)_SMMHC(1527-1877) mRNA opt1
  source 1..1823: mol_type = other RNA
aggagagtcccgcagtcggcgtccagcggctctgcttgttcgtgtgtgtgtcgttgcaggccttattcaagcttaccatgccccgcgtggtgccggaccagcggagcaagttcgagaacgaggagttcttccgcaagctgtcccgggagtgcgagatcaagtacacgggcttccgcgaccggccccacgaggagcgccaggcccggttccagaacgcctgccgcgacgggcggagcgagatcgcgttcgtggccaccggcacgaacctgtccctgcagttcttccccgccagctggcagggggagcagcgccagaccccctcccgggagtacgtggacctggagcgcgaggccggcaaggtctacctcaaggccccgatgatcctgaacggggtgtgcgtgatctggaagggctggatcgacctgcagcggctcgacggcatggggtgcctggagttcgacgaggagcgcgcgcagcaggaggacgccctggcccagcaggccttcgaggaggcgcggcgccggacccgcgagttcgaggaccgggaccgcagccaccgggaggagatggaggtccacgagctcgagaagtccaagcgcgccctggagacccagatggaggagatgaagacgcagctggaggagctcgaggacgagctgcaggccaccgaggacgccaagctgcgcctcgaggtgaacatgcaggccctgaagggccagttcgagcgggacctgcaggcgcgcgacgagcagaacgaggagaagcggcgccagctccagcggcagctgcacgagtacgagaccgagctggaggacgagcgcaagcagcgggccctcgccgccgccgcgaagaagaagctggagggggacctgaaggacctcgagctgcaggccgacagcgccatcaagggccgcgaggaggccatcaagcagctgcggaagctccaggcccagatgaaggacttccagcgcgagctggaggacgcgcgggcctcccgcgacgagatcttcgccaccgccaaggagaacgagaagaaggccaagagcctggaggcggacctcatgcagctgcaggaggacctggccgccgccgagcgggcgcgcaagcaggccgacctcgagaaggaggagctggccgaggagctggcctccagcctctccgggcggaacgccctgcaggacgagaagcgccggctggaggcgcgcatcgcccagctcgaggaggagctggaggaggagcagggcaacatggaggccatgagcgaccgggtgcgcaaggccacgcagcaggccgagcagctgtccaacgagctcgcgaccgagcgcagcaccgcccagaagaacgagtccgcccggcagcagctggagcgccagaacaaggagctgcggagcaagctccacgagatggagggcgccgtcaagtccaagttcaagagcaccatcgccgcgctggaggccaagatcgcccagctggaggagcaggtcgagcaggaggcccgcgagaagcaggcggccaccaagagcctgaagcagaaggacaagaagctcaaggagatcctgctccaggtggaggacgagcggaagatggccgagcagtacaaggagcaggccgagaaggggaacgcctgaggactagtccctgttcccagagcccacttttttttctttttttgaaataaaatagcctgtctttcagatctcaaaggctcttttcagagccaccaaaaaaaaaaaaaaaaaaaaaaaaaaaaaaaaaaaaaaaaaaaaaaaaaaaaaaaaaaaaaaaaaaaaaaaaaaaaaaaaaaaaaaaaaaaaaaaaaaaaa

SEQ ID NO: 831 - RNA, 884 nt, synthetic construct
  misc_feature 1..884: note = Artificial____CBFbeta(1-165)_Linker_Lifeact mRNA opt1
  source 1..884: mol_type = other RNA
aggagagtcccgcagtcggcgtccagcggctctgcttgttcgtgtgtgtgtcgttgcaggccttattcaagcttaccatgccccgcgtggtccccgaccagcggagcaagttcgagaacgaggagttcttccgcaagctgtcccgggagtgcgagatcaagtacaccggcttccgcgaccggccccacgaggagcgccaggcccggttccagaacgcctgccgcgacgggcggagcgagatcgcgttcgtggccaccggcacgaacctctccctgcagttcttccccgccagctggcagggggagcagcgccagaccccctcccgggagtacgtggacctggagcgcgaggccggcaaggtctacctcaaggccccgatgatcctgaacggggtgtgcgtgatctggaagggctggatcgacctgcagcggctcgacggcatggggtgcctggagttcgacgaggagcgcgcgcagcaggaggacgccctggcccagcaggccttcgaggaggcgcggcgccggacccgcgagttcgaggaccgggaccgcagccaccgggaggagatggagggcgggtccggcgggagcggcggctccgggggcagcgggggcggcggggtcgccgacctcatcaagaagttcgagtccatcagcaaggaggagggcgacccgcccgtggccacctgaggactagtccctgttcccagagcccacttttttttctttttttgaaataaaatagcctgtctttcagatctcaaaggctcttttcagagccaccaaaaaaaaaaaaaaaaaaaaaaaaaaaaaaaaaaaaaaaaaaaaaaaaaaaaaaaaaaaaaaaaaaaaaaaaaaaaaaaaaaaaaaaaaaaaaaaaaaaaa

SEQ ID NO: 832 - RNA, 851 nt, synthetic construct
  misc_feature 1..851: note = Artificial____CBFbeta(1-165)_HIF1alpha(549-575) mRNA opt1
  source 1..851: mol_type = other RNA
aggagagtcccgcagtcggcgtccagcggctctgcttgttcgtgtgtgtgtcgttgcaggccttattcaagcttaccatgccccgcgtggtcccggaccagcggagcaagttcgagaacgaggagttcttccgcaagctgtcccgggagtgcgagatcaagtacaccggcttccgcgaccggccccacgaggagcgccaggcccggttccagaacgcctgccgcgacgggcggagcgagatcgcgttcgtggccaccggcacgaacctctccctgcagttcttccccgccagctggcagggggagcagcgccagaccccctcccgggagtacgtggacctggagcgcgaggccggcaaggtctacctcaaggccccgatgatcctgaacggggtgtgcgtgatctggaagggctggatcgacctgcagcggctcgacggcatggggtgcctggagttcgacgaggagcgcgcgcagcaggaggacgccctggcccagcaggccttcgaggaggcgcggcgccggacccgcgagttcgaggaccgggaccgcagccaccgggaggagatggagcccttctccacccaggacacggacctcgacctggagatgctggccccctacatccccatggacgacgacttccagctccgctgaggactagtccctgttcccagagcccacttttttttctttttttgaaataaaatagcctgtctttcagatctcaaaggctcttttcagagccaccaaaaaaaaaaaaaaaaaaaaaaaaaaaaaaaaaaaaaaaaaaaaaaaaaaaaaaaaaaaaaaaaaaaaaaaaaaaaaaaaaaaaaaaaaaaaaaaaaaaaa

SEQ ID NO: 833 - RNA, 896 nt, synthetic construct
  misc_feature 1..896: note Artificial____CBFbeta(1-165)_Linker_HIF1alpha(549-575) mRNA opt1
  source 1..896: mol_type = other RNA
aggagagtcccgcagtcggcgtccagcggctctgcttgttcgtgtgtgtgtcgttgcaggccttattcaagcttaccatgccccgcgtggtcccggaccagcggagcaagttcgagaacgaggagttcttccgcaagctgtcccgggagtgcgagatcaagtacaccggcttccgcgaccggccccacgaggagcgccaggcccggttccagaacgcctgccgcgacgggcggagcgagatcgcgttcgtggccaccggcacgaacctctccctgcagttcttccccgccagctggcagggggagcagcgccagaccccctcccgggagtacgtggacctggagcgcgaggccggcaaggtctacctcaaggccccgatgatcctgaacggggtgtgcgtgatctggaagggctggatcgacctgcagcggctcgacggcatggggtgcctggagttcgacgaggagcgcgcgcagcaggaggacgccctggcccagcaggccttcgaggaggcgcggcgccggacccgcgagttcgaggaccgggaccgcagccaccgggaggagatggagggcgggtccggcgggagcggcggctccgggggcagcgggggcggccccttctccacccaggacacggacctcgacctggagatgctggccccctacatccccatggacgacgacttccagctccgctgaggactagtccctgttcccagagcccacttttttttctttttttgaaataaaatagcctgtctttcagatctcaaaggctcttttcagagccaccaaaaaaaaaaaaaaaaaaaaaaaaaaaaaaaaaaaaaaaaaaaaaaaaaaaaaaaaaaaaaaaaaaaaaaaaaaaaaaaaaaaaaaaaaaaaaaaaaaaaa

SEQ ID NO: 834 - RNA, 2531 nt, synthetic construct
  misc_feature 1..2531: note = Artificial____RUNX1(1-177)_N_RUNX1T1a(31-604) mRNA opt1
  source 1..2531: mol_type = other RNA
aggagagtcccgcagtcggcgtccagcggctctgcttgttcgtgtgtgtgtcgttgcaggccttattcaagcttaccatgcgcatccccgtggacgccagcacctcccggcgcttcaccccgcccagcacggccctgtcccccggcaagatgagcgaggcgctccccctgggggccccggacgccggcgccgccctggcggggaagctccggtccggcgaccgcagcatggtcgaggtgctggccgaccaccccggggagctggtgcggaccgactcccccaacttcctctgcagcgtcctgcccacccactggcgctgcaacaagaccctgccgatcgccttcaaggtggtggccctcggcgacgtccccgacggcacgctggtgaccgtgatggcggggaacgacgagaactactccgccgagctgcggaacgccaccgccgccatgaagaaccaggtcgcgcgcttcaacgacctccggttcgtgggccgcagcgggcggggcaagtccttcaccctgacgatcaccgtgttcaccaaccccccccaggtcgccacctaccaccgcgccatcaagatcacggtggacgggccgcgggagccccgcaaccggaccgagaagcacagcaccatgcccgactcccccgtggacgtcaagacccagagccgcctgacgccgcccaccatgccccccccgcccaccacccagggcgccccccggacgtccagcttcacccccaccaccctcacgaacggcacctcccacagcccgaccgccctgaacggggcgccctccccccccaacggcttcagcaacgggccgagctccagctccagctccagcctggccaaccagcagctcccccccgcctgcggcgcccgccagctgtccaagctgaagcggttcctcaccacgctgcagcagttcggcaacgacatcagcccggagatcggggagcgcgtgcggaccctggtgctcggcctggtcaactccaccctgaccatcgaggagttccacagcaagctccaggaggccacgaacttccccctgcgccccttcgtgatccccttcctgaaggcgaacctcccgctgctgcagcgcgagctcctgcactgcgcccggctggccaagcagaaccccgcccagtacctcgcccagcacgagcagctgctgctcgacgcgtccaccaccagccccgtggactccagcgagctgctgctcgacgtcaacgagaacgggaagcgccggacccccgaccgcacgaaggagaacggcttcgaccgggagccgctgcactccgagcaccccagcaagcgcccctgcaccatctcccccgggcagcggtacagcccgaacaacggcctgtcctaccagcccaacggcctcccccaccccaccccgccccccccccagcactaccgcctggacgacatggccatcgcccaccactaccgggacagctaccgccacccgagccaccgggacctgcgcgaccggaaccgccccatggggctgcacggcacccggcaggaggagatgatcgaccaccgcctcaccgaccgggagtgggccgaggagtggaagcacctggaccacctgctcaactgcatcatggacatggtggagaagacgcgccggtccctgaccgtgctgcgccgctgccaggaggcggaccgggaggagctcaactactggatccgccggtacagcgacgccgaggacctgaagaaggggggcgggtccagctccagccactcccgccagcagagccccgtcaaccccgacccggtggccctggacgcccaccgggagttcctccaccgccccgcctccggctacgtccccgaggagatctggaagaaggcggaggaggccgtgaacgaggtgaagcggcaggccatgaccgagctgcagaaggccgtcagcgaggccgagcgcaaggcgcacgacatgatcaccacggagcgggccaagatggagcgcaccgtggccgaggccaagcggcaggccgcggaggacgccctggccgtgatcaaccagcaggaggactccagcgagtcctgctggaactgcggccgcaaggccagcgagacctgctccgggtgcaacaccgcgcggtactgcggcagcttctgccagcacaaggactgggagaagcaccaccacatctgcgggcagacgctccaggcccagcagcagggcgacaccccggccgtctccagcagcgtgacccccaactccggggccggcagccccatggacacccccccggccgcgacgccccgctccaccacccccggcacccccagcacgatcgagaccaccccgcggtgaggactagtccctgttcccagagcccacttttttttctttttttgaaataaaatagcctgtctttcagatctcaaaggctcttttcagagccaccaaaaaaaaaaaaaaaaaaaaaaaaaaaaaaaaaaaaaaaaaaaaaaaaaaaaaaaaaaaaaaaaaaaaaaaaaaaaaaaaaaaaaaaaaaaaaaaaaaaaa

SEQ ID NO: 835 - RNA, 1046 nt, synthetic construct
  misc_feature 1..1046: note = Artificial____RUNX1(1-241)_RUNX1T1b(short) mRNA opt1
  source 1..1046: mol_type = other RNA
aggagagtcccgcagtcggcgtccagcggctctgcttgttcgtgtgtgtgtcgttgcaggccttattcaagcttaccatgcgcatccccgtggacgccagcacctcccggcgcttcaccccgcccagcacggccctgtcccccggcaagatgagcgaggcgctccccctgggggccccggacgccggcgccgccctggcggggaagctccggtccggcgaccgcagcatggtcgaggtgctggccgaccaccccggggagctggtgcggaccgactcccccaacttcctctgcagcgtcctgcccacccactggcgctgcaacaagaccctgccgatcgccttcaaggtggtggccctcggcgacgtccccgacggcacgctggtgaccgtgatggcggggaacgacgagaactactccgccgagctgcggaacgccaccgccgccatgaagaaccaggtcgcgcgcttcaacgacctccggttcgtgggccgcagcgggcggggcaagtccttcaccctgacgatcaccgtgttcaccaacccgccccaggtcgccacctaccaccgcgccatcaagatcacggtggacgggccccgggagccccgccggcaccgccagaagctggacgaccagaccaagcccggcagcctctccttcagcgagcggctgtccgagctggagcagctccgccggaccgccatgcgcgtgagcccccaccacccggcccccacccccaacccccgggcgtccctgaaccacagcacggccttcaacccgcagccccagtcccagatgcaggaggtcggcttctgccacgtggcccaggtggggctgaagctcctgggctgaggactagtccctgttcccagagcccacttttttttctttttttgaaataaaatagcctgtctttcagatctcaaaggctcttttcagagccaccaaaaaaaaaaaaaaaaaaaaaaaaaaaaaaaaaaaaaaaaaaaaaaaaaaaaaaaaaaaaaaaaaaaaaaaaaaaaaaaaaaaaaaaaaaaaaaaaaaaaa

SEQ ID NO: 836 - RNA, 2750 nt, synthetic construct
  misc_feature 1..2750: note = Artificial____RUNX1(1-241)_V_RUNX1T1b(22-604) mRNA opt1
  source 1..2750: mol_type = other RNA
aggagagtcccgcagtcggcgtccagcggctctgcttgttcgtgtgtgtgtcgttgcaggccttattcaagcttaccatgcgcatccccgtggacgccagcacctcccggcgcttcaccccgcccagcacggccctgtcccccggcaagatgagcgaggcgctccccctgggggccccggacgccggcgccgccctggcggggaagctccggtccggcgaccgcagcatggtcgaggtgctggccgaccaccccggggagctggtgcggaccgactcccccaacttcctctgcagcgtcctgcccacccactggcgctgcaacaagaccctgccgatcgccttcaaggtggtggccctcggcgacgtccccgacggcacgctggtgaccgtgatggcggggaacgacgagaactactccgccgagctgcggaacgccaccgccgccatgaagaaccaggtcgcgcgcttcaacgacctccggttcgtgggccgcagcgggcggggcaagtccttcaccctgacgatcaccgtgttcaccaacccgccccaggtcgccacctaccaccgcgccatcaagatcacggtggacgggccccgggagccccgccggcaccgccagaagctggacgaccagaccaagcccggcagcctctccttcagcgagcggctgtccgagctggagcagctccgccggaccgccatgcgcgtgagcccccaccacccggcccccacccccaacccccgggcgtccctgaaccacagcacggccttcaacccgcagccccagtcccagatgcaggtcggccccgagaagcgcgtgcccgccatgccggggagccccgtggaggtcaagatccagagccgctccagcccgcccaccatgccgcccctgcccccgatcaaccccggcgggccccggcccgtgtccttcacccccaccgccctcagcaacggcatcaaccactccccgcccacgctgaacggcgcccccagcccgccccagcgcttctccaacgggcccgcgagctccaccagctccgccctgaccaaccagcagctccccgcgacctgcggcgcccggcagctgagcaagctgaagcgcttcctcacgaccctgcagcagttcgggaacgacatctcccccgagatcggcgagaaggtgcggaccctggtcctcgccctggtgaacagcaccgtgacgatcgaggagttccactgcaagctgcaggaggccaccaacttccccctccgccccttcgtcatccccttcctgaaggccaacctgccgctcctgcagcgggagctgctccactgcgcccgcgccgcgaagcagaccccctcccagtacctggcccagcacgagcacctcctgctgaacaccagcatcgcctcccccgccgacagctccgagctgctcatggaggtgcacgggaacggcaagcggcccagcccggagcgccgggaggagaacagcttcgaccgcgacacgatcgcccccgagccgcccgcgaagcgggtctgcaccatctcccccgcgccccgccacagccccgccctgaccgtgccgctgatgaaccccggcgggcagttccaccccacgcccccgcccctgcagcactacaccctcgaggacatcgccacctcccacctgtaccgggagcccaacaagatgctggagcaccgcgaggtgcgggaccgccaccacagcctcggcctgaacgggggctaccaggacgagctggtcgaccaccggctcaccgagcgcgagtgggccgacgagtggaagcacctggaccacgccctgaactgcatcatggagatggtggagaagacccgccggtccatggccgtgctccgccggtgccaggagagcgaccgcgaggagctgaactactggaagcggcgctacaacgagaacaccgagctgcggaagacggggaccgagctcgtctcccgccagcacagccccggctccgccgacagcctgtccaacgacagccagcgggagttcaactcccgcccgggcaccgggtacgtgcccgtggagttctggaagaagaccgaggaggccgtcaacaaggtgaagatccaggccatgagcgaggtgcagaaggcggtcgccgaggccgagcagaaggccttcgaggtgatcgcgacggagcgggcccgcatggagcagaccatcgccgacgtgaagcggcaggccgccgaggacgcgttcctggtcatcaacgagcaggaggagtccaccgagaactgctggaactgcggccgcaaggccagcgagacctgctccgggtgcaacatcgcccggtactgcggcagcttctgccagcacaaggactgggagcgccaccaccggctctgcgggcagaacctgcacggccagagcccccacggccaggggcgccccctgctcccggtgggccgggggtccagcgcccgctccgccgactgcagcgtgccctcccccgcgctggacaagacgagcgccaccacctcccggagctccacccccgccagcgtcacggccatcgacaccaacggcctgtgaggactagtccctgttcccagagcccacttttttttctttttttgaaataaaatagcctgtctttcagatctcaaaggctcttttcagagccaccaaaaaaaaaaaaaaaaaaaaaaaaaaaaaaaaaaaaaaaaaaaaaaaaaaaaaaaaaaaaaaaaaaaaaaaaaaaaaaaaaaaaaaaaaaaaaaaaaaaaa

SEQ ID NO: 837 - RNA, 2750 nt, synthetic construct
  misc_feature 1..2750: note = Artificial____RUNX1(1-241)_I_RUNX1T1b(22-604) mRNA opt1
  source 1..2750: mol_type = other RNA
aggagagtcccgcagtcggcgtccagcggctctgcttgttcgtgtgtgtgtcgttgcaggccttattcaagcttaccatgcgcatccccgtggacgccagcacctcccggcgcttcaccccgcccagcacggccctgtcccccggcaagatgagcgaggcgctccccctgggggccccggacgccggcgccgccctggcggggaagctccggtccggcgaccgcagcatggtcgaggtgctggccgaccaccccggggagctggtgcggaccgactcccccaacttcctctgcagcgtcctgcccacccactggcgctgcaacaagaccctgccgatcgccttcaaggtggtggccctcggcgacgtccccgacggcacgctggtgaccgtgatggcggggaacgacgagaactactccgccgagctgcggaacgccaccgccgccatgaagaaccaggtcgcgcgcttcaacgacctccggttcgtgggccgcagcgggcggggcaagtccttcaccctgacgatcaccgtgttcaccaacccgccccaggtcgccacctaccaccgcgccatcaagatcacggtggacgggccccgggagccccgccggcaccgccagaagctggacgaccagaccaagcccggcagcctctccttcagcgagcggctgtccgagctggagcagctccgccggaccgccatgcgcgtgagcccccaccacccggcccccacccccaacccccgggcgtccctgaaccacagcacggccttcaacccgcagccccagtcccagatgcagatcggccccgagaagcgcgtccccgccatgccggggagccccgtggaggtgaagatccagagccgctccagcccgcccaccatgccgcccctgcccccgatcaaccccggcgggccccggcccgtctccttcacccccaccgccctcagcaacggcatcaaccactccccgcccacgctgaacggcgcccccagcccgccccagcgcttctccaacgggcccgcgagctccaccagctccgccctgaccaaccagcagctccccgcgacctgcggcgcccggcagctgagcaagctgaagcgcttcctcacgaccctgcagcagttcgggaacgacatctcccccgagatcggcgagaaggtgcggaccctggtgctcgccctggtcaacagcaccgtgacgatcgaggagttccactgcaagctgcaggaggccaccaacttccccctccgccccttcgtgatccccttcctgaaggccaacctgccgctcctgcagcgggagctgctccactgcgcccgcgccgcgaagcagaccccctcccagtacctggcccagcacgagcacctcctgctgaacaccagcatcgcctcccccgccgacagctccgagctgctcatggaggtccacgggaacggcaagcggcccagcccggagcgccgggaggagaacagcttcgaccgcgacacgatcgcccccgagccgcccgcgaagcgggtgtgcaccatctcccccgcgccccgccacagccccgccctgaccgtcccgctgatgaaccccggcgggcagttccaccccacgcccccgcccctgcagcactacaccctcgaggacatcgccacctcccacctgtaccgggagcccaacaagatgctggagcaccgcgaggtgcgggaccgccaccacagcctcggcctgaacgggggctaccaggacgagctggtggaccaccggctcaccgagcgcgagtgggccgacgagtggaagcacctggaccacgccctgaactgcatcatggagatggtcgagaagacccgccggtccatggccgtgctccgccggtgccaggagagcgaccgcgaggagctgaactactggaagcggcgctacaacgagaacaccgagctgcggaagacggggaccgagctcgtgtcccgccagcacagccccggctccgccgacagcctgtccaacgacagccagcgggagttcaactcccgcccgggcaccgggtacgtccccgtggagttctggaagaagaccgaggaggccgtgaacaaggtcaagatccaggccatgagcgaggtgcagaaggcggtggccgaggccgagcagaaggccttcgaggtcatcgcgacggagcgggcccgcatggagcagaccatcgccgacgtgaagcggcaggccgccgaggacgcgttcctggtgatcaacgagcaggaggagtccaccgagaactgctggaactgcggccgcaaggccagcgagacctgctccgggtgcaacatcgcccggtactgcggcagcttctgccagcacaaggactgggagcgccaccaccggctctgcgggcagaacctgcacggccagagcccccacggccaggggcgccccctgctcccggtcggccgggggtccagcgcccgctccgccgactgcagcgtgccctcccccgcgctggacaagacgagcgccaccacctcccggagctccacccccgccagcgtgacggccatcgacaccaacggcctgtgaggactagtccctgttcccagagcccacttttttttctttttttgaaataaaatagcctgtctttcagatctcaaaggctcttttcagagccaccaaaaaaaaaaaaaaaaaaaaaaaaaaaaaaaaaaaaaaaaaaaaaaaaaaaaaaaaaaaaaaaaaaaaaaaaaaaaaaaaaaaaaaaaaaaaaaaaaaaaa

SEQ ID NO: 838 - RNA, 1634 nt, synthetic construct
  misc_feature 1..1634: note = Homo sapiens__Q01196-1__RUNX1(K83E_R174Q) mRNA opt3
  source 1..1634: mol_type = other RNA
aggagagtcccgcagtcggcgtccagcggctctgcttgttcgtgtgtgtgtcgttgcaggccttattcaagcttaccatgagaatccccgtggatgccagcaccagcagaagattcacccctcctagcaccgctctgagccctggcaagatgtctgaagctctgcctctgggagcacctgatgctggtgcagctctggccggaaaactgagaagcggcgacagatccatggtggaagtgctggctgatcaccccggcgaacttgtgcggacagacagccctaatttcctgtgcagcgtgctgcctacacactggcggtgcaatgagacactgcctatcgccttcaaggtggtggccctgggagatgtgcctgatggcacactggttacagtgatggccggcaacgacgagaactacagcgccgagctgagaaatgccaccgccgccatgaagaaccaggtggccagattcaacgacctgagattcgtgggcagaagcggcaggggcaagagctttaccctgaccatcaccgtgttcaccaatcctccacaggtggcaacctaccaccgggccatcaagatcacagtggacggccctcaagagcccagacggcacagacagaaactggacgaccagaccaagcctggcagcctgagctttagcgagagactgagcgagctggaacagctgagaagaaccgccatgcgggtgtccccacatcaccctgctcctacacctaatcctcgggccagcctgaatcacagcaccgcctttaatccccagcctcagagccagatgcaggacaccagacagattcagccttctccaccttggagctacgaccagagctaccagtacctgggctctatcgcctctcctagcgtgcaccctgccacacctattagtcctggcagagccagcggcatgacaacactgtctgccgagctgtccagcagactgagcacagcccctgatctgaccgccttcagcgaccctagacagttccctgctctgcccagcatctctgaccccagaatgcattaccctggcgccttcacatacagccccacacctgtgacaagcggcatcggcattggcatgtctgccatgggaagcgccaccagataccacacctacctgcctccaccttatcctggcagctctcaggctcaaggcggcccttttcaggccagctctccttcctaccacctgtactatggcgccagcgccggctcctaccagttttctatggttggaggcgagcggagccctcctagaatcctgcctccttgtaccaacgccagcacaggatctgccctgctgaatcccagcctgcctaatcagagcgacgtggtggaagccgagggcagccatagcaacagccctaccaatatggcccctagcgccagactggaagaggccgtttggaggccttactgaggactagtccctgttcccagagcccacttttttttctttttttgaaataaaatagcctgtctttcagatctcaaaggctcttttcagagccaccaaaaaaaaaaaaaaaaaaaaaaaaaaaaaaaaaaaaaaaaaaaaaaaaaaaaaaaaaaaaaaaaaaaaaaaaaaaaaaaaaaaaaaaaaaaaaaaaaaaaa

SEQ ID NO: 839 - RNA, 2108 nt, synthetic construct
  misc_feature 1..2108: note = Homo sapiens____CBFbeta(1-165)_SMMHC(1527-1972) mRNA opt3
  source 1..2108: mol_type = other RNA
aggagagtcccgcagtcggcgtccagcggctctgcttgttcgtgtgtgtgtcgttgcaggccttattcaagcttaccatgcctagagtggtgcccgaccagagaagcaagttcgagaacgaagagttctttcggaagctgagcagagagtgcgagatcaagtacaccggcttccgggacagaccccacgaagaaagacaggccagattccagaacgcctgcagagatggcagatccgagatcgcctttgtggccaccggcaccaatctgagcctgcagttctttccagcctcctggcagggcgagcagagacaaacacccagcagagaatacgtggacctggaacgcgaggccggcaaggtgtacctgaaggcccctatgatcctgaacggcgtgtgcgtgatctggaaaggctggatcgatctgcagcggctggatggcatgggctgcctggaatttgacgaggaaagagcccagcaagaggacgcccttgctcagcaggcctttgaggaagccagaaggcggaccagagagttcgaggacagagacagatcccaccgggaagagatggaagtgcacgagctggaaaagagcaagagagccctggaaacccagatggaagaaatgaagacccagctcgaggaactcgaggacgagctgcaggccacagaggatgccaagctgagactggaagtgaacatgcaggccctgaagggccagttcgagagagatctgcaggctagggacgagcagaacgaggaaaagcggagacagctgcagaggcagctgcacgagtacgagacagagctggaagatgagcggaagcagagagcactggccgctgccgccaagaagaaactggaaggcgacctgaaggatctggaactccaggccgacagcgccatcaagggaagagaagaggccatcaagcagctgcggaagctgcaagcccagatgaaggacttccagcgcgagttggaagatgccagagccagcagggatgagatcttcgccaccgccaaagagaacgagaagaaggccaagagcctggaagccgatctgatgcagctccaagaggatctggctgccgccgagagagccagaaaacaggccgacctggaaaaagaggaactggccgaagaactggccagcagcctgtctggcagaaacgctctgcaggacgagaagagaaggctggaagccaggatcgcccagttggaggaagaactcgaagaggaacagggcaacatggaagccatgagcgacagagtgcggaaggccacacagcaggctgagcagctgagcaatgagctggccaccgagagaagcacagcccagaagaatgagagcgccaggcagcagctcgagcggcagaacaaagagctgagaagcaaactgcacgaaatggaaggggccgtgaagtccaagttcaagagcacaatcgccgctctcgaggccaagatcgctcagctcgaagaacaggtggaacaagaggcccgggaaaagcaggccgccacaaagtctctgaagcagaaggacaagaagctgaaagaaatcctgctgcaggtcgaggatgagagaaagatggccgagcagtacaaagaacaggctgagaagggcaacgccagagtgaagcagctgaaacggcaactggaagaggccgaggaagagtcccagagaatcaacgccaacagacggaaactgcagagagagctggacgaagccaccgagtccaatgaggccatgggcagagaagtgaacgccctgaagtctaagctgcggagaggcaacgaaaccagcttcgtgcccagcagaagatccggcggcagaagagtgatcgagaacgccgatggctctgaggaagaaaccgacaccagagatgccgacttcaacggcacaaaggccagcgagtaaggactagtccctgttcccagagcccacttttttttctttttttgaaataaaatagcctgtctttcagatctcaaaggctcttttcagagccaccaaaaaaaaaaaaaaaaaaaaaaaaaaaaaaaaaaaaaaaaaaaaaaaaaaaaaaaaaaaaaaaaaaaaaaaaaaaaaaaaaaaaaaaaaaaaaaaaaaaaa

SEQ ID NO: 840 - RNA, 1823 nt, synthetic construct
  misc_feature 1..1823: note = Artificial____CBFbeta(1-165)_SMMHC(1527-1877) mRNA opt3
  source 1..1823: mol_type = other RNA
aggagagtcccgcagtcggcgtccagcggctctgcttgttcgtgtgtgtgtcgttgcaggccttattcaagcttaccatgcctagagtggtgcccgaccagagaagcaagttcgagaacgaagagttctttcggaagctgagcagagagtgcgagatcaagtacaccggcttccgggacagaccccacgaagaaagacaggccagattccagaacgcctgcagagatggcagatccgagatcgcctttgtggccaccggcaccaatctgagcctgcagttctttccagcctcctggcagggcgagcagagacaaacacccagcagagaatacgtggacctggaacgcgaggccggcaaggtgtacctgaaggcccctatgatcctgaacggcgtgtgcgtgatctggaaaggctggatcgatctgcagcggctggatggcatgggctgcctggaatttgacgaggaaagagcccagcaagaggacgcccttgctcagcaggcctttgaggaagccagaaggcggaccagagagttcgaggacagagacagatcccaccgggaagagatggaagtgcacgagctggaaaagagcaagagagccctggaaacccagatggaagaaatgaagacccagctcgaggaactcgaggacgagctgcaggccacagaggatgccaagctgagactggaagtgaacatgcaggccctgaagggccagttcgagagagatctgcaggctagggacgagcagaacgaggaaaagcggagacagctgcagaggcagctgcacgagtacgagacagagctggaagatgagcggaagcagagagcactggccgctgccgccaagaagaaactggaaggcgacctgaaggatctggaactccaggccgacagcgccatcaagggaagagaagaggccatcaagcagctgcggaagctgcaagcccagatgaaggacttccagcgcgagttggaagatgccagagccagcagggatgagatcttcgccaccgccaaagagaacgagaagaaggccaagagcctggaagccgatctgatgcagctccaagaggatctggctgccgccgagagagccagaaaacaggccgacctggaaaaagaggaactggccgaagaactggccagcagcctgtctggcagaaacgctctgcaggacgagaagagaaggctggaagccaggatcgcccagttggaggaagaactcgaagaggaacagggcaacatggaagccatgagcgacagagtgcggaaggccacacagcaggctgagcagctgagcaatgagctggccaccgagagaagcacagcccagaagaatgagagcgccaggcagcagctcgagcggcagaacaaagagctgagaagcaaactgcacgaaatggaaggggccgtgaagtccaagttcaagagcacaatcgccgctctcgaggccaagatcgctcagctcgaagaacaggtggaacaagaggcccgggaaaagcaggccgccacaaagtctctgaagcagaaggacaagaagctgaaagaaatcctgctgcaggtcgaggatgagagaaagatggccgagcagtacaaagaacaggctgagaagggcaacgcctgaggactagtccctgttcccagagcccacttttttttctttttttgaaataaaatagcctgtctttcagatctcaaaggctcttttcagagccaccaaaaaaaaaaaaaaaaaaaaaaaaaaaaaaaaaaaaaaaaaaaaaaaaaaaaaaaaaaaaaaaaaaaaaaaaaaaaaaaaaaaaaaaaaaaaaaaaaaaaa

SEQ ID NO: 841 - RNA, 884 nt, synthetic construct
  misc_feature 1..884: note = Artificial____CBFbeta(1-165)_Linker_Lifeact mRNA opt3
  source 1..884: mol_type = other RNA
aggagagtcccgcagtcggcgtccagcggctctgcttgttcgtgtgtgtgtcgttgcaggccttattcaagcttaccatgcctagagtggtgcccgaccagagaagcaagttcgagaacgaagagttctttcggaagctgagcagagagtgcgagatcaagtacaccggcttccgggacagaccccacgaagaaagacaggccagattccagaacgcctgcagagatggcagatccgagatcgcctttgtggccaccggcaccaatctgagcctgcagttctttccagcctcctggcagggcgagcagagacaaacacccagcagagaatacgtggacctggaacgcgaggccggcaaggtgtacctgaaggcccctatgatcctgaacggcgtgtgcgtgatctggaaaggctggatcgatctgcagcggctggatggcatgggctgcctggaatttgacgaggaaagagcccagcaagaggacgcccttgctcagcaggcctttgaggaagccagaaggcggaccagagagttcgaggacagagacagatcccaccgggaagagatggaaggcggatctggtggaagcggaggtagcggaggatcaggcggaggcggagttgccgatctgatcaagaagttcgagtccatcagcaaagaagagggcgaccctccagtggccacatgaggactagtccctgttcccagagcccacttttttttctttttttgaaataaaatagcctgtctttcagatctcaaaggctcttttcagagccaccaaaaaaaaaaaaaaaaaaaaaaaaaaaaaaaaaaaaaaaaaaaaaaaaaaaaaaaaaaaaaaaaaaaaaaaaaaaaaaaaaaaaaaaaaaaaaaaaaaaaa

SEQ ID NO: 842 - RNA, 851 nt, synthetic construct
  misc_feature 1..851: note = Artificial____CBFbeta(1-165)_HIF1alpha(549-575) mRNA opt3
  source 1..851: mol_type = other RNA
aggagagtcccgcagtcggcgtccagcggctctgcttgttcgtgtgtgtgtcgttgcaggccttattcaagcttaccatgcctagagtggtgcccgaccagagaagcaagttcgagaacgaagagttctttcggaagctgagcagagagtgcgagatcaagtacaccggcttccgggacagaccccacgaagaaagacaggccagattccagaacgcctgcagagatggcagatccgagatcgcctttgtggccaccggcaccaatctgagcctgcagttctttccagcctcctggcagggcgagcagagacaaacacccagcagagaatacgtggacctggaacgcgaggccggcaaggtgtacctgaaggcccctatgatcctgaacggcgtgtgcgtgatctggaaaggctggatcgatctgcagcggctggatggcatgggctgcctggaatttgacgaggaaagagcccagcaagaggacgcccttgctcagcaggcctttgaggaagccagaaggcggaccagagagttcgaggacagagacagatcccaccgggaagagatggaacccttcagcacccaagacaccgacctggacctcgaaatgctggccccttacatccccatggacgacgacttccagctgcggtaaggactagtccctgttcccagagcccacttttttttctttttttgaaataaaatagcctgtctttcagatctcaaaggctcttttcagagccaccaaaaaaaaaaaaaaaaaaaaaaaaaaaaaaaaaaaaaaaaaaaaaaaaaaaaaaaaaaaaaaaaaaaaaaaaaaaaaaaaaaaaaaaaaaaaaaaaaaaaa

SEQ ID NO: 843 - RNA, 896 nt, synthetic construct
  misc_feature 1..896: note Artificial____CBFbeta(1-165)_Linker_HIF1alpha(549-575) mRNA opt3
  source 1..896: mol_type = other RNA
aggagagtcccgcagtcggcgtccagcggctctgcttgttcgtgtgtgtgtcgttgcaggccttattcaagcttaccatgcctagagtggtgcccgaccagagaagcaagttcgagaacgaagagttctttcggaagctgagcagagagtgcgagatcaagtacaccggcttccgggacagaccccacgaagaaagacaggccagattccagaacgcctgcagagatggcagatccgagatcgcctttgtggccaccggcaccaatctgagcctgcagttctttccagcctcctggcagggcgagcagagacaaacacccagcagagaatacgtggacctggaacgcgaggccggcaaggtgtacctgaaggcccctatgatcctgaacggcgtgtgcgtgatctggaaaggctggatcgatctgcagcggctggatggcatgggctgcctggaatttgacgaggaaagagcccagcaagaggacgcccttgctcagcaggcctttgaggaagccagaaggcggaccagagagttcgaggacagagacagatcccaccgggaagagatggaaggcggatctggtggaagcggaggtagcggaggatctggcggaggacctttcagcacccaagacaccgacctggacctcgaaatgctggccccttacatccccatggacgacgacttccagctgcggtaaggactagtccctgttcccagagcccacttttttttctttttttgaaataaaatagcctgtctttcagatctcaaaggctcttttcagagccaccaaaaaaaaaaaaaaaaaaaaaaaaaaaaaaaaaaaaaaaaaaaaaaaaaaaaaaaaaaaaaaaaaaaaaaaaaaaaaaaaaaaaaaaaaaaaaaaaaaaaa

SEQ ID NO: 844 - RNA, 2531 nt, synthetic construct
  misc_feature 1..2531: note = Artificial____RUNX1(1-177)_N_RUNX1T1a(31-604) mRNA opt3
  source 1..2531: mol_type = other RNA
aggagagtcccgcagtcggcgtccagcggctctgcttgttcgtgtgtgtgtcgttgcaggccttattcaagcttaccatgagaatccccgtggatgccagcaccagcagaagattcacccctcctagcaccgctctgagccctggcaagatgtctgaagctctgcctctgggagcacctgatgctggtgcagctctggccggaaaactgagaagcggcgacagatccatggtggaagtgctggctgatcaccccggcgaacttgtgcggacagacagccctaatttcctgtgcagcgtgctgcctacacactggcggtgcaacaagacactgcctatcgccttcaaggtggtggctctgggagatgtgcctgatggcacactggtcacagtgatggccggcaacgacgagaattacagcgccgagctgagaaatgccaccgccgccatgaagaaccaggtggccagattcaacgacctgagattcgtgggcagaagcggcaggggcaagagctttaccctgaccatcaccgtgttcaccaatcctccacaggtggcaacctaccaccgggccatcaagatcaccgtggatggccctagagagccccggaacagaacagagaagcacagcaccatgcctgacagccccgtggacgtgaaaacccagagcagactgacccctccaaccatgcctcctccacctacaacacagggcgctcctagaaccagcagcttcacccctaccacactgaccaacggcacctctcacagccccacagctcttaatggcgccccttctccacctaacggcttcagcaatggcccaagcagcagcagctctagcagcctggctaatcagcagctgcctcctgcttgtggcgctagacagctgagcaagctgaagcggttcctgaccacactgcagcagttcggcaacgatatcagccccgagatcggcgagcgcgtcagaacactggttctgggcctcgtgaatagcaccctgacaatcgaagagttccacagcaagctgcaagaggccaccaactttccgctgcggcctttcgtgatcccattcctgaaggccaacctgcctctgctgcagagagaactgctccactgcgccagactggccaagcagaaccctgctcagtatctggcccagcacgagcaactgctgctggacgcctctacaacaagccctgtggatagcagcgagctgctcctggatgtgaacgagaacggcaagcggagaacccctgaccggaccaaagagaacggcttcgacagagagcctctgcacagcgagcaccccagcaaaagaccctgcacaatcagccctggccagcggtactctcccaacaacggcctgagctaccagcctaacggactgccccatcctacacctccacctccacagcactaccggctggacgatatggctatcgcccaccactaccgggacagctacagacaccctagccaccgggacctgcgggacagaaatagacctatgggcctgcacggcacccggcaagaggaaatgattgaccaccggctgaccgacagagaatgggccgaagagtggaagcacctggaccatctgctgaactgcatcatggatatggtggaaaagacccggcggagcctgaccgtgctgagaagatgtcaagaggccgatagagaggaactgaactactggatccggcggtacagcgacgccgaggatcttaagaaaggcggcggatctagcagcagccacagcagacagcagagccccgtgaatcctgatcctgtggcactggatgcccacagagaatttctgcacagacccgccagcggctacgtgccagaggaaatctggaagaaagccgaagaggccgtgaacgaagtgaagagacaggccatgaccgaactgcagaaagccgtgtctgaggccgagagaaaggcccacgatatgatcacaaccgagcgggccaagatggaaagaacagtggccgaggccaaaagacaggccgccgaagatgctctggctgtgatcaatcagcaagaggacagcagcgagtcctgctggaactgtggcagaaaggccagcgagacatgcagcggctgtaacaccgccagatattgcggcagcttctgccagcacaaggactgggagaagcaccaccacatctgcggccagacactgcaggctcagcagcaaggcgatactcctgccgtgtctagcagcgtgacccctaattctggcgccggatctcccatggatacccctccagctgccacacctagaagcacaacccctggcacacccagcaccatcgagacaacccctagatgaggactagtccctgttcccagagcccacttttttttctttttttgaaataaaatagcctgtctttcagatctcaaaggctcttttcagagccaccaaaaaaaaaaaaaaaaaaaaaaaaaaaaaaaaaaaaaaaaaaaaaaaaaaaaaaaaaaaaaaaaaaaaaaaaaaaaaaaaaaaaaaaaaaaaaaaaaaaaa

SEQ ID NO: 845 - RNA, 1046 nt, synthetic construct
  misc_feature 1..1046: note = Artificial____RUNX1(1-241)_RUNX1T1b(short) mRNA opt3
  source 1..1046: mol_type = other RNA
aggagagtcccgcagtcggcgtccagcggctctgcttgttcgtgtgtgtgtcgttgcaggccttattcaagcttaccatgagaatccccgtggatgccagcaccagcagaagattcacccctcctagcaccgctctgagccctggcaagatgtctgaagctctgcctctgggagcacctgatgctggtgcagctctggccggaaaactgagaagcggcgacagatccatggtggaagtgctggctgatcaccccggcgaacttgtgcggacagacagccctaatttcctgtgcagcgtgctgcctacacactggcggtgcaacaagacactgcctatcgccttcaaggtggtggctctgggagatgtgcctgatggcacactggtcacagtgatggccggcaacgacgagaattacagcgccgagctgagaaatgccaccgccgccatgaagaaccaggtggccagattcaacgacctgagattcgtgggcagaagcggcaggggcaagagctttaccctgaccatcaccgtgttcaccaatcctccacaggtggcaacctaccaccgggccatcaagatcaccgtggatggccctagagagcccagacggcacagacagaaactggacgaccagaccaagcctggcagcctgagctttagcgagagactgagcgagctggaacagctgagaagaaccgccatgcgggtgtccccacatcaccctgctcctacacctaatcctcgggccagcctgaatcacagcaccgcctttaatccccagcctcagagccagatgcaagaagtgggcttctgtcacgtggcccaagtgggactgaagctgctgggataaggactagtccctgttcccagagcccacttttttttctttttttgaaataaaatagcctgtctttcagatctcaaaggctcttttcagagccaccaaaaaaaaaaaaaaaaaaaaaaaaaaaaaaaaaaaaaaaaaaaaaaaaaaaaaaaaaaaaaaaaaaaaaaaaaaaaaaaaaaaaaaaaaaaaaaaaaaaaa

SEQ ID NO: 846 - RNA, 2750 nt, synthetic construct
  misc_feature 1..2750: note = Artificial____RUNX1(1-241)_V_RUNX1T1b(22-604) mRNA opt3
  source 1..2750: mol_type = other RNA
aggagagtcccgcagtcggcgtccagcggctctgcttgttcgtgtgtgtgtcgttgcaggccttattcaagcttaccatgagaatccccgtggatgccagcaccagcagaagattcacccctcctagcaccgctctgagccctggcaagatgtctgaagctctgcctctgggagcacctgatgctggtgcagctctggccggaaaactgagaagcggcgacagatccatggtggaagtgctggctgatcaccccggcgaacttgtgcggacagacagccctaatttcctgtgcagcgtgctgcctacacactggcggtgcaacaagacactgcctatcgccttcaaggtggtggctctgggagatgtgcctgatggcacactggtcacagtgatggccggcaacgacgagaattacagcgccgagctgagaaatgccaccgccgccatgaagaaccaggtggccagattcaacgacctgagattcgtgggcagaagcggcaggggcaagagctttaccctgaccatcaccgtgttcaccaatcctccacaggtggcaacctaccaccgggccatcaagatcaccgtggatggccctagagagcccagacggcacagacagaaactggacgaccagaccaagcctggcagcctgagctttagcgagagactgagcgagctggaacagctgagaagaaccgccatgcgggtgtccccacatcaccctgctcctacacctaatcctcgggccagcctgaatcacagcaccgcctttaatccccagcctcagagccagatgcaagtgggccctgagaaaagggtgccagccatgcctggaagccccgtggaagtgaagatccagagcagatctagccctcctaccatgcctcctctgcctccaatcaatcctggcggccctagacctgtgtccttcacacctaccgctctgtccaacggcatcaatcacagccctccaacactgaatggcgccccatctccacctcagcggttttctaatggccctgccagcagcacaagcagcgccctgacaaatcagcagctgcctgctacatgtggcgccagacagctgagcaagctgaagcggtttctgaccacactgcagcagttcggcaacgatatcagccccgagatcggcgagaaagtgcggacactggttctggccctggtcaacagcaccgtgaccatcgaagagttccactgcaagctgcaagaggccaccaactttccgctgcggcctttcgtgatcccattcctgaaggccaacctgcctctgctgcagagagagctgctgcattgcgccagagccgccaagcagacaccttctcagtatctggcccagcacgagcatctgctgctgaacacctctatcgcctctccagccgatagcagcgagctgctcatggaagtgcacggcaacggaaagaggccctctccagagcggagagaggaaaacagcttcgaccgggacacaatcgcccctgagcctccagccaagagagtgtgcacaatcagcccagctcctagacacagccccgctctgacagtgccccttatgaaccctggcggacagtttcaccccacacctccaccactccagcactacaccctggaagatatcgccaccagccacctgtaccgcgagcctaacaagatgctggaacaccgggaagtgcgcgacaggcaccattctctgggactgaacggcggctaccaggacgaactggtggatcacagactgaccgagcgcgagtgggccgatgaatggaaacacctggatcacgccctgaactgcatcatggaaatggtggaaaagacccggcggagcatggccgtcctgagaagatgtcaagagagcgacagagaggaactgaactactggaagcggaggtacaacgagaacaccgagctgcggaaaaccggcactgagctggtgtccagacagcactctcctggctctgccgatagcctgagcaacgactcccagagagagttcaacagcagacccggcacaggctacgtgcccgtggaattttggaagaaaaccgaagaggccgtgaacaaagtcaagattcaggccatgagcgaggtgcagaaagccgtggctgaggccgaacagaaagccttcgaagtgatcgccaccgagcgggccagaatggaacagacaatcgccgacgtgaagagacaggccgccgaggatgccttcctggtcatcaacgagcaagaggaaagcaccgagaactgctggaactgcggcagaaaggccagcgagacatgcagcggctgcaatatcgccagatattgcggcagcttctgccagcacaaggactgggagagacaccacagactgtgcggccagaatctgcacggacagagccctcatggacagggcagacctctgctccctgttggcagaggatctagcgccagatctgccgactgtagcgtgccatctcctgcactggataagaccagcgccaccacaagcagaagcagcacaccagcctctgtgaccgccatcgataccaacggactgtgaggactagtccctgttcccagagcccacttttttttctttttttgaaataaaatagcctgtctttcagatctcaaaggctcttttcagagccaccaaaaaaaaaaaaaaaaaaaaaaaaaaaaaaaaaaaaaaaaaaaaaaaaaaaaaaaaaaaaaaaaaaaaaaaaaaaaaaaaaaaaaaaaaaaaaaaaaaaaa

SEQ ID NO: 847 - RNA, 2750 nt, synthetic construct
  misc_feature 1..2750: note = Artificial____RUNX1(1-241)_I_RUNX1T1b(22-604) mRNA opt3
  source 1..2750: mol_type = other RNA
aggagagtcccgcagtcggcgtccagcggctctgcttgttcgtgtgtgtgtcgttgcaggccttattcaagcttaccatgagaatccccgtggatgccagcaccagcagaagattcacccctcctagcaccgctctgagccctggcaagatgtctgaagctctgcctctgggagcacctgatgctggtgcagctctggccggaaaactgagaagcggcgacagatccatggtggaagtgctggctgatcaccccggcgaacttgtgcggacagacagccctaatttcctgtgcagcgtgctgcctacacactggcggtgcaacaagacactgcctatcgccttcaaggtggtggctctgggagatgtgcctgatggcacactggtcacagtgatggccggcaacgacgagaattacagcgccgagctgagaaatgccaccgccgccatgaagaaccaggtggccagattcaacgacctgagattcgtgggcagaagcggcaggggcaagagctttaccctgaccatcaccgtgttcaccaatcctccacaggtggcaacctaccaccgggccatcaagatcaccgtggatggccctagagagcccagacggcacagacagaaactggacgaccagaccaagcctggcagcctgagctttagcgagagactgagcgagctggaacagctgagaagaaccgccatgcgggtgtccccacatcaccctgctcctacacctaatcctcgggccagcctgaatcacagcaccgcctttaatccccagcctcagagccagatgcagatcggccctgagaaaagggtgccagccatgcctggaagccccgtggaagtgaagatccagagcagatctagccctcctaccatgcctcctctgcctccaatcaatcctggcggccctagacctgtgtccttcacacctaccgctctgtccaacggcatcaatcacagccctccaacactgaatggcgccccatctccacctcagcggttttctaatggccctgccagcagcacaagcagcgccctgacaaatcagcagctgcctgctacatgtggcgccagacagctgagcaagctgaagcggtttctgaccacactgcagcagttcggcaacgatatcagccccgagatcggcgagaaagtgcggacactggttctggccctggtcaacagcaccgtgaccatcgaagagttccactgcaagctgcaagaggccaccaactttccgctgcggcctttcgtgatcccattcctgaaggccaacctgcctctgctgcagagagagctgctgcattgcgccagagccgccaagcagacaccttctcagtatctggcccagcacgagcatctgctgctgaacacctctatcgcctctccagccgatagcagcgagctgctcatggaagtgcacggcaacggaaagaggccctctccagagcggagagaggaaaacagcttcgaccgggacacaatcgcccctgagcctccagccaagagagtgtgcacaatcagcccagctcctagacacagccccgctctgacagtgccccttatgaaccctggcggacagtttcaccccacacctccaccactccagcactacaccctggaagatatcgccaccagccacctgtaccgcgagcctaacaagatgctggaacaccgggaagtgcgcgacaggcaccattctctgggactgaacggcggctaccaggacgaactggtggatcacagactgaccgagcgcgagtgggccgatgaatggaaacacctggatcacgccctgaactgcatcatggaaatggtggaaaagacccggcggagcatggccgtcctgagaagatgtcaagagagcgacagagaggaactgaactactggaagcggaggtacaacgagaacaccgagctgcggaaaaccggcactgagctggtgtccagacagcactctcctggctctgccgatagcctgagcaacgactcccagagagagttcaacagcagacccggcacaggctacgtgcccgtggaattttggaagaaaaccgaagaggccgtgaacaaagtcaagattcaggccatgagcgaggtgcagaaagccgtggctgaggccgaacagaaagccttcgaagtgatcgccaccgagcgggccagaatggaacagacaatcgccgacgtgaagagacaggccgccgaggatgccttcctggtcatcaacgagcaagaggaaagcaccgagaactgctggaactgcggcagaaaggccagcgagacatgcagcggctgcaatatcgccagatattgcggcagcttctgccagcacaaggactgggagagacaccacagactgtgcggccagaatctgcacggacagagccctcatggacagggcagacctctgctccctgttggcagaggatctagcgccagatctgccgactgtagcgtgccatctcctgcactggataagaccagcgccaccacaagcagaagcagcacaccagcctctgtgaccgccatcgataccaacggactgtgaggactagtccctgttcccagagcccacttttttttctttttttgaaataaaatagcctgtctttcagatctcaaaggctcttttcagagccaccaaaaaaaaaaaaaaaaaaaaaaaaaaaaaaaaaaaaaaaaaaaaaaaaaaaaaaaaaaaaaaaaaaaaaaaaaaaaaaaaaaaaaaaaaaaaaaaaaaaaa

SEQ ID NO: 848 - RNA, 1634 nt, synthetic construct
  misc_feature 1..1634: note = Homo sapiens__Q01196-1__RUNX1(K83E_R174Q) mRNA opt3
  source 1..1634: mol_type = other RNA
aggagagtcccgcagtcggcgtccagcggctctgcttgttcgtgtgtgtgtcgttgcaggccttattcaagcttaccatgagaatccccgtggacgccagcacctccaggcggttcacacctccatctactgctctgtcaccgggcaagatgagtgaggcactcccccttggggcccctgatgcgggagctgccctggcaggtaaattgcgcagcggcgaccgatccatggtcgaagttttagccgatcacccaggggagctggtgcgtacggactctcccaactttctatgctcggtactccctacccattggagatgtaatgaaacactgccaattgctttcaaggtggtcgcacttggagatgtgcccgacggcactctggttaccgtgatggccggtaacgatgagaattactcagctgaattgaggaacgccacagcggcaatgaaaaatcaggtcgcccggtttaacgacctccgcttcgtggggagaagcggaaggggcaagagttttaccctgactataacagtattcaccaatcctccacaagttgctacgtatcaccgggccatcaaaattactgtggatggcccgcaggagccccgccgacatagacagaagctggacgatcagaccaagcctgggtccctctcttttagcgagaggttatccgaactggagcaacttcggcgtacagcaatgcgcgtctcaccacaccatcccgctcctactccaaaccccagagccagtttgaatcacagcaccgcgttcaacccgcagcctcagtctcagatgcaagacacaaggcagatccagccctccccaccttggtcatacgatcagagctatcaatacctgggaagtattgcctctccctccgtgcacccagcaacccccatcagccctggtcgggcttcgggcatgacgactctatctgccgaactctcctcacgactgagtacagctccagaccttaccgcctttagcgacccgcgccagttccccgcactgccttccatatctgatccaagaatgcattatcccggggcctttacttacagccctacaccagtgacctcaggaatcggcattggtatgagtgctatggggtccgcgacgaggtatcacacctacttgcccccgccttacccaggaagctctcaggcacaaggcggccccttccaggcctcaagtcctagctatcatctctactatggggcttccgccggatcttaccagttttcgatggtcggtggcgagcggagcccaccccgcatcctgcctccctgcacaaatgcatccactgggtcagccttactgaacccaagtctcccgaatcagtctgacgttgtggaggctgaaggaagccactccaactcacctaccaatatggcccccagcgcaagacttgaggaagcggtatggaggccatattgaggactagtccctgttcccagagcccacttttttttctttttttgaaataaaatagcctgtctttcagatctcaaaggctcttttcagagccaccaaaaaaaaaaaaaaaaaaaaaaaaaaaaaaaaaaaaaaaaaaaaaaaaaaaaaaaaaaaaaaaaaaaaaaaaaaaaaaaaaaaaaaaaaaaaaaaaaaaaa

SEQ ID NO: 849 - RNA, 2108 nt, synthetic construct
  misc_feature 1..2108: note = Homo sapiens____CBFbeta(1-165)_SMMHC(1527-1972) mRNA opt3
  source 1..2108: mol_type = other RNA
aggagagtcccgcagtcggcgtccagcggctctgcttgttcgtgtgtgtgtcgttgcaggccttattcaagcttaccatgcccagagtggtccctgaccagaggagcaagttcgagaacgaagagtttttccggaaactgtcccgcgaatgcgagatcaagtacaccggctttcgagatcgtccacacgaagagagacaagccaggttccagaatgcttgtcgggacgggcgctctgagattgcatttgttgccacaggaactaacctctcacttcagttctttccggcgagttggcagggtgaacaaagacagacgcccagcagggagtatgtggatctggaacgggaggctggcaaagtatacttgaaggcccctatgatattaaatggggtgtgcgtcatctggaaaggatggattgacctgcagcgcctagatggcatgggttgtctcgagttcgacgaggaacgagcacagcaagaagatgccctggctcagcaggcatttgaggaagccagaaggcggacccgtgagttcgaggaccgcgatagatcccatagggaagagatggaagtgcacgagcttgaaaagtctaagcgggctctggagacacagatggaggaaatgaaaactcaattggaggaactcgaggacgaactgcaggccaccgaggatgcgaagctgcgactcgaggttaacatgcaggcattaaaagggcaatttgaacgcgacctgcaggccagagatgagcagaatgaagagaagaggcggcagcttcaacgccagttgcatgagtatgaaacagagctggaagacgagagaaaacagagggctctagccgcagctgccaagaagaaactcgaaggagacctgaaggatcttgagctgcaggcggactcggccatcaaaggccgtgaggaagcaattaagcaattgcggaaactccaggctcagatgaaggatttccagcgagagctggaagacgccagagcttcaagggatgagatctttgccaccgcaaaagaaaacgagaagaaggccaagagcttagaggctgacctgatgcaactccaggaagatcttgcggcagccgagcgcgctcggaagcaggccgacctggaaaaagaggaattggcagaggagctagccagttccctgtctggcagaaatgctctccaggatgaaaagaggcgcctggaggcccgaatagcacaacttgaagaggagctggaagaggaacaggggaacatggaggcgatgagcgaccgggtgcgtaaagctactcagcaagccgaacagttgtccaatgagctcgcaacagagagatcaaccgcccagaagaacgaaagtgctaggcagcaactggagcgccagaataaggaattacggagcaaactgcacgagatggaaggagccgtcaagtctaaattcaagtccacgatcgcagctctagaggccaaaattgcgcagctcgaggaacaggtggagcaagaagccagagagaagcaggctgcaactaagtcactgaaacagaaggataaaaagttgaaagaaatccttctgcaggtagaggacgagaggaagatggccgaacaatacaaggagcaggctgaaaaaggtaacgcccgagttaagcagctcaaacgccaactggaggaggcagaagaggaaagccagcggattaatgcgaacagaaggaaacttcagcgtgagctggacgaagccaccgagagtaatgaggctatgggccgcgaagtgaacgccttgaaatctaagctccggagagggaacgagacatccttcgtcccaagcaggcgatcgggaggccggcgcgtgatcgaaaatgcagatggttctgaggaagagactgacaccagagatgctgactttaacgggacaaaagcctccgagtgaggactagtccctgttcccagagcccacttttttttctttttttgaaataaaatagcctgtctttcagatctcaaaggctcttttcagagccaccaaaaaaaaaaaaaaaaaaaaaaaaaaaaaaaaaaaaaaaaaaaaaaaaaaaaaaaaaaaaaaaaaaaaaaaaaaaaaaaaaaaaaaaaaaaaaaaaaaaaa

SEQ ID NO: 850 - RNA, 1823 nt, synthetic construct
  misc_feature 1..1823: note = Artificial____CBFbeta(1-165)_SMMHC(1527-1877) mRNA opt3
  source 1..1823: mol_type = other RNA
aggagagtcccgcagtcggcgtccagcggctctgcttgttcgtgtgtgtgtcgttgcaggccttattcaagcttaccatgcccagagtggtccctgaccagaggagcaagttcgagaacgaagagtttttccggaaactgtcccgcgaatgcgagatcaagtacaccggctttcgagatcgtccacacgaagagagacaagccaggttccagaatgcttgtcgggacgggcgctctgagattgcatttgttgccacaggaactaacctctcacttcagttctttccggcgagttggcagggtgaacaaagacagacgcccagcagggagtatgtggatctggaacgggaggctggcaaagtatacttgaaggcccctatgatattaaatggggtgtgcgtcatctggaaaggatggattgacctgcagcgcctagatggcatgggttgtctcgagttcgacgaggaacgagcacagcaagaagatgccctggctcagcaggcatttgaggaagccagaaggcggacccgtgagttcgaggaccgcgatagatcccatagggaagagatggaagtgcacgagcttgaaaagtctaagcgggctctggagacacagatggaggaaatgaaaactcaattggaggaactcgaggacgaactgcaggccaccgaggatgcgaagctgcgactcgaggttaacatgcaggcattaaaagggcaatttgaacgcgacctgcaggccagagatgagcagaatgaagagaagaggcggcagcttcaacgccagttgcatgagtatgaaacagagctggaagacgagagaaaacagagggctctagccgcagctgccaagaagaaactcgaaggagacctgaaggatcttgagctgcaggcggactcggccatcaaaggccgtgaggaagcaattaagcaattgcggaaactccaggctcagatgaaggatttccagcgagagctggaagacgccagagcttcaagggatgagatctttgccaccgcaaaagaaaacgagaagaaggccaaaagccttgaggctgacctgatgcaactccaggaagatcttgcggcagccgagcgcgctcggaagcaggccgacctggaaaaagaggaattggcagaggagctagccagttccctgtctggcagaaatgctctccaggatgaaaagaggcgcctggaggcccgaatagcacaacttgaagaggagctggaagaggaacaggggaacatggaggcgatgagcgaccgggtgcgtaaagctactcagcaagccgaacagttgtccaatgagctcgcaacagagagatcaaccgcccagaagaacgaaagtgctaggcagcaactggagcgccagaataaggaattacggagcaaactgcacgagatggaaggagccgtcaagtctaaattcaagtccacgatcgcagctctagaggccaaaattgcgcagctcgaggaacaggtggagcaagaagccagagagaagcaggctgcaactaagtcactgaaacagaaggataaaaagttaaaagaaatcttgctgcaggtagaggacgagaggaagatggccgaacaatacaaggagcaggctgaaaaaggtaacgcctgaggactagtccctgttcccagagcccacttttttttctttttttgaaataaaatagcctgtctttcagatctcaaaggctcttttcagagccaccaaaaaaaaaaaaaaaaaaaaaaaaaaaaaaaaaaaaaaaaaaaaaaaaaaaaaaaaaaaaaaaaaaaaaaaaaaaaaaaaaaaaaaaaaaaaaaaaaaaaa

SEQ ID NO: 851 - RNA, 884 nt, synthetic construct
  misc_feature 1..884: note = Artificial____CBFbeta(1-165)_Linker_Lifeact mRNA opt3
  source 1..884: mol_type = other RNA
aggagagtcccgcagtcggcgtccagcggctctgcttgttcgtgtgtgtgtcgttgcaggccttattcaagcttaccatgcccagagtggtccctgaccagaggagcaagttcgagaacgaagagtttttccggaaactgtcccgcgaatgcgagatcaagtacaccggctttcgagatcgtccacacgaagagagacaagccaggttccagaatgcttgtcgggacgggcgctctgagattgcatttgttgccacaggaactaacctctcacttcagttctttccggcgagttggcagggtgaacaaagacagacgcccagcagggagtatgtggatctggaacgggaggctggcaaagtatacttgaaggcccctatgatattaaatggggtgtgcgtcatctggaaaggatggattgacctgcagcgcctagatggcatgggttgtctcgagttcgacgaggaacgagcacagcaagaagatgccctggctcagcaggcatttgaggaagccagaaggcggacccgtgagttcgaggaccgcgatagatcccatagggaagagatggaagggggatctggcggctcagggggatcgggtggcagcgggggaggcggtgtggctgaccttatcaagaagtttgagagtatttccaaagaagagggggatccacccgttgccacatgaggactagtccctgttcccagagcccacttttttttctttttttgaaataaaatagcctgtctttcagatctcaaaggctcttttcagagccaccaaaaaaaaaaaaaaaaaaaaaaaaaaaaaaaaaaaaaaaaaaaaaaaaaaaaaaaaaaaaaaaaaaaaaaaaaaaaaaaaaaaaaaaaaaaaaaaaaaaaa

SEQ ID NO: 852 - RNA, 851 nt, synthetic construct
  misc_feature 1..851: note = Artificial____CBFbeta(1-165)_HIF1alpha(549-575) mRNA opt3
  source 1..851: mol_type = other RNA
aggagagtcccgcagtcggcgtccagcggctctgcttgttcgtgtgtgtgtcgttgcaggccttattcaagcttaccatgcccagagtggtccctgaccagaggagcaagttcgagaacgaagagtttttccggaaactgtcccgcgaatgcgagatcaagtacaccggctttcgagatcgtccacacgaagagagacaagccaggttccagaatgcttgtcgggacgggcgctctgagattgcatttgttgccacaggaactaacctctcacttcagttctttccggcgagttggcagggtgaacaaagacagacgcccagcagggagtatgtggatctggaacgggaggctggcaaagtatacttgaaggcccctatgatattaaatggggtgtgcgtcatctggaaaggatggattgacctgcagcgcctagatggcatgggttgtctcgagttcgacgaggaacgagcacagcaagaagatgccctggctcagcaggcatttgaggaagccagaaggcggacccgtgagttcgaggaccgcgatagatcccatagggaagagatggaaccattttctacacaggacactgatcttgacctggagatgttggctccctatatccctatggatgacgacttccaactccggtgaggactagtccctgttcccagagcccacttttttttctttttttgaaataaaatagcctgtctttcagatctcaaaggctcttttcagagccaccaaaaaaaaaaaaaaaaaaaaaaaaaaaaaaaaaaaaaaaaaaaaaaaaaaaaaaaaaaaaaaaaaaaaaaaaaaaaaaaaaaaaaaaaaaaaaaaaaaaaa

SEQ ID NO: 853 - RNA, 896 nt, synthetic construct
  misc_feature 1..896: note Artificial____CBFbeta(1-165)_Linker_HIF1alpha(549-575) mRNA opt3
  source 1..896: mol_type = other RNA
aggagagtcccgcagtcggcgtccagcggctctgcttgttcgtgtgtgtgtcgttgcaggccttattcaagcttaccatgcccagagtggtccctgaccagaggagcaagttcgagaacgaagagtttttccggaaactgtcccgcgaatgcgagatcaagtacaccggctttcgagatcgtccacacgaagagagacaagccaggttccagaatgcttgtcgggacgggcgctctgagattgcatttgttgccacaggaactaacctctcacttcagttctttccggcgagttggcagggtgaacaaagacagacgcccagcagggagtatgtggatctggaacgggaggctggcaaagtatacttgaaggcccctatgatattaaatggggtgtgcgtcatctggaaaggatggattgacctgcagcgcctagatggcatgggttgtctcgagttcgacgaggaacgagcacagcaagaagatgccctggctcagcaggcatttgaggaagccagaaggcggacccgtgagttcgaggaccgcgatagatcccatagggaagagatggaagggggatctggcggctcagggggatcgggtggcagcgggggaggcccatttagtacacaggacactgatcttgacctggagatgttggctccctatatccctatggatgacgacttccaactccggtgaggactagtccctgttcccagagcccacttttttttctttttttgaaataaaatagcctgtctttcagatctcaaaggctcttttcagagccaccaaaaaaaaaaaaaaaaaaaaaaaaaaaaaaaaaaaaaaaaaaaaaaaaaaaaaaaaaaaaaaaaaaaaaaaaaaaaaaaaaaaaaaaaaaaaaaaaaaaaa

SEQ ID NO: 854 - RNA, 2531 nt, synthetic construct
  misc_feature 1..2531: note = Artificial____RUNX1(1-177)_N_RUNX1T1a(31-604) mRNA opt3
  source 1..2531: mol_type = other RNA
aggagagtcccgcagtcggcgtccagcggctctgcttgttcgtgtgtgtgtcgttgcaggccttattcaagcttaccatgagaatccccgtggacgccagcacctccaggcggttcacacctccatctactgctctgtcaccgggcaagatgagtgaggcactcccccttggggcccctgatgcgggagctgccctggcaggtaaattgcgcagcggcgaccgatccatggtcgaagttttagccgatcacccaggggagctggtgcgtacggactctcccaactttctatgctcggtactccctacccattggagatgtaataagacactgccaattgctttcaaagtggtcgcacttggagatgtgcccgacggcactctggttaccgtgatggccggtaacgatgaaaattactcagctgagttgaggaacgccacagcggcaatgaagaatcaggtcgcccggtttaacgacctccgcttcgtggggagaagcggaaggggcaaaagttttaccctgactataacagtattcaccaatcctccacaagttgctacgtatcaccgggccatcaagattactgtggatggcccgcgcgaaccccgaaacagaaccgagaagcattccacaatgcctgactctccagtcgatgtgaaaactcagagcaggctgacaccccctaccatgccacccccgcctaccacgcagggggcaccccggacttcctcatttacaccaaccactctcacaaatggaaccagtcacagccctacggctttaaacggtgccccctctccacccaatggcttctccaacgggccttcaagcagttcttccagctcgctggcgaatcagcaacttccaccggcctgcggagcacgtcagttgtctaagctgaaacgctttctaaccacactccagcagttcggcaacgacatctcccccgagattggtgaaagagtgaggactctggtccttgggctggttaattcaaccttgacaatcgaggaatttcatagtaagctccaagaggctactaacttccctctgcggccatttgtgatacccttcttaaaagccaacctgcctctccttcagcgagagctgttgcactgtgctcgcctagccaagcagaatccagcacagtacctggcccaacacgaacagctcctgcttgatgctagcaccacatcccccgtagactctagcgagctgttgctcgacgtgaacgaaaatggaaagagaaggaccccggatcggactaaagagaacggcttcgaccgcgaacctctgcattcagagcacccaagtaagagaccctgcacgatctcccctggccagaggtatagccccaataacgggttatcttaccaaccaaatggactgcctcatcccacaccaccgcctccccagcactatcgtctagatgacatggcgattgcacaccattaccgggattcatatcgacacccaagtcatagagacctcagggatcgcaaccggcccatgggtctgcacggcaccagacaggaggaaatgatcgaccataggcttactgatcgcgagtgggccgaagagtggaaacacttggaccatctgctcaattgtattatggatatggtcgaaaagacccgacggagcctgacagtgcttcgtagatgccaggaggctgacagggaggaactgaactactggatccgccggtactccgacgccgaggatttgaaaaagggcggagggtcttcgagctcccactcaagacaacagagtcctgttaatccagaccccgtggcactcgatgcccacagggaatttctgcatcgacctgcttctggttatgtcccggaggaaatatggaaaaaggccgaggaggcagtgaacgaagtaaagcgccaggcgatgaccgagttacagaaagctgttagcgaagccgagcggaaggcacacgacatgattactacagagagagccaaaatggaaaggacggtggctgaggccaagcgtcaagcagctgaagatgccctggcggtcatcaatcagcaggaggactcctcagaaagctgttggaactgcgggcgcaaagcctctgagacctgttccggctgcaatactgctcggtactgtggaagtttctgccagcacaaggattgggagaagcatcaccatatttgcggccaaacactacaggcacagcagcaaggggacaccccagccgtgtctagctccgtcacacccaactcaggagctggtagtcctatggatactccacccgccgcaacccctagaagcacgaccccgggcacaccctcgactatcgaaaccacaccaaggtgaggactagtccctgttcccagagcccacttttttttctttttttgaaataaaatagcctgtctttcagatctcaaaggctcttttcagagccaccaaaaaaaaaaaaaaaaaaaaaaaaaaaaaaaaaaaaaaaaaaaaaaaaaaaaaaaaaaaaaaaaaaaaaaaaaaaaaaaaaaaaaaaaaaaaaaaaaaaaa

SEQ ID NO: 855 - RNA, 1046 nt, synthetic construct
  misc_feature 1..1046: note = Artificial____RUNX1(1-241)_RUNX1T1b(short) mRNA opt3
  source 1..1046: mol_type = other RNA
aggagagtcccgcagtcggcgtccagcggctctgcttgttcgtgtgtgtgtcgttgcaggccttattcaagcttaccatgagaatccccgtggacgccagcacctccaggcggttcacacctccatctactgctctgtcaccgggcaagatgagtgaggcactcccccttggggcccctgatgcgggagctgccctggcaggtaaattgcgcagcggcgaccgatccatggtcgaagttttagccgatcacccaggggagctggtgcgtacggactctcccaactttctatgctcggtactccctacccattggagatgtaataagacactgccaattgctttcaaagtggtcgcacttggagatgtgcccgacggcactctggttaccgtgatggccggtaacgatgaaaattactcagctgagttgaggaacgccacagcggcaatgaagaatcaggtcgcccggtttaacgacctccgcttcgtggggagaagcggaaggggcaaaagttttaccctgactataacagtattcaccaatcctccacaagttgctacgtatcaccgggccatcaagattactgtggatggcccgcgcgaaccccgaagacataggcagaagctggacgatcagaccaaacctgggtccctctcttttagcgagcggttatccgagctggaacagcttcgtcgcacagcaatgagagtctcaccacaccatcccgctcctactccaaaccccagggccagtttgaatcacagcaccgcgttcaacccgcaacctcagtctcagatgcaggaggtgggattttgccacgtggcccaagtcggtctgaagctactcggctgaggactagtccctgttcccagagcccacttttttttctttttttgaaataaaatagcctgtctttcagatctcaaaggctcttttcagagccaccaaaaaaaaaaaaaaaaaaaaaaaaaaaaaaaaaaaaaaaaaaaaaaaaaaaaaaaaaaaaaaaaaaaaaaaaaaaaaaaaaaaaaaaaaaaaaaaaaaaaa

SEQ ID NO: 856 - RNA, 2750 nt, synthetic construct
  misc_feature 1..2750: note = Artificial____RUNX1(1-241)_V_RUNX1T1b(22-604) mRNA opt3
  source 1..2750: mol_type = other RNA
aggagagtcccgcagtcggcgtccagcggctctgcttgttcgtgtgtgtgtcgttgcaggccttattcaagcttaccatgagaatccccgtggacgccagcacctccaggcggttcacacctccatctactgctctgtcaccgggcaagatgagtgaggcactcccccttggggcccctgatgcgggagctgccctggcaggtaaattgcgcagcggcgaccgatccatggtcgaagttttagccgatcacccaggggagctggtgcgtacggactctcccaactttctatgctcggtactccctacccattggagatgtaataagacactgccaattgctttcaaagtggtcgcacttggagatgtgcccgacggcactctggttaccgtgatggccggtaacgatgaaaattactcagctgagttgaggaacgccacagcggcaatgaagaatcaggtcgcccggtttaacgacctccgcttcgtggggagaagcggaaggggcaaaagttttaccctgactataacagtattcaccaatcctccacaagttgctacgtatcaccgggccatcaagattactgtggatggcccgcgcgaaccccgaagacataggcagaagctggacgatcagaccaaacctgggtccctctcttttagcgagcggttatccgagctggaacagcttcgtcgcacagcaatgagagtctcaccacaccatcccgctcctactccaaaccccagggccagtttgaatcacagcaccgcgttcaacccgcaacctcagtctcagatgcaagtgggacccgagaagcgggtgccagccatgcctggttcccccgtcgaagttaaaatccagtcacgaagcagtccacccacaatgcctccactgccgcccattaatcctggcgggccacgccccgtgtcttttacccctacggcactatccaacggaatcaatcacagcccacccactctcaacggcgctccgtcgcctccacagagattctctaatggtcccgcctcctcaacaagtagcgctctgaccaaccagcagcttcctgccacttgcggggcaaggcaactgtccaagttgaaacggtttctcacaaccctgcagcagttcggaaacgacatatctcccgagatcggcgagaaggtacgcacgttagtgctggccctcgtcaatagcaccgtgacaattgaagagtttcattgtaagctacaagaagctactaacttcccactgagacctttcgttatcccctttttgaaagcgaatctaccactgctccagagggagctgcttcactgcgcacgtgccgctaagcagaccccgtcacagtacctggcccaacatgaacacttgctcctgaacacaagtattgcatcccctgccgatagctctgagttactgatggaggtgcacggcaatgggaaacggccctcaccagaacgaagagaggaaaacagtttcgacagggacactatcgctcccgagcctccagccaagcgcgtctgtaccataagccccgcacctcggcattccccggcgctaacagtgccactcatgaatcccggaggtcagtttcaccctaccccaccccctctgcagcattatactcttgaagatattgctacgtctcacttgtacagagagccgaacaaaatgctggagcatagggaagtacgcgaccgacaccactcgctcggcctgaatgggggatatcaggatgagcttgttgaccatcggctgacagaacgtgagtgggccgatgaatggaagcacttggaccatgcactcaactgcatcatggagatggtggagaaaaccagaaggagcatggccgtcctgcgccggtgtcaagaatccgatagagaggaattaaattactggaagaggcgatataacgagaatactgagctgcgcaagaccggcacagaacttgtgtcacggcagcacagtcccggttctgctgacagcctctccaacgattcacagagagagttcaatagcaggccagggaccggctacgtccctgtggaattttggaaaaagactgaggaagccgttaacaaagtgaagattcaggcaatgtctgaggtacaaaaagctgtcgccgaggcggaacagaaggccttcgaggtgatcgctacagaacgtgcacgcatggagcagacgatcgccgacgttaagcggcaggctgccgaagatgcatttctggtgattaacgagcaagaggaatccaccgagaattgctggaactgtggaagaaaagcgagtgaaacttgcagcggctgtaatatagccaggtactgcgggtctttctgccagcacaaggactgggagcgacatcaccggctttgtggacagaacttgcatggtcaatcaccccacggccaggggcgcccactgctccctgtcggaagaggctccagtgctaggagcgccgactgctcggtgccctccccagcactggataaaacatctgctaccacaagccggtcaagtactccggcctccgtaaccgcaatcgacacgaatggtttatgaggactagtccctgttcccagagcccacttttttttctttttttgaaataaaatagcctgtctttcagatctcaaaggctcttttcagagccaccaaaaaaaaaaaaaaaaaaaaaaaaaaaaaaaaaaaaaaaaaaaaaaaaaaaaaaaaaaaaaaaaaaaaaaaaaaaaaaaaaaaaaaaaaaaaaaaaaaaaa

SEQ ID NO: 857 - RNA, 2750 nt, synthetic construct
  misc_feature 1..2750: note = Artificial____RUNX1(1-241)_I_RUNX1T1b(22-604) mRNA opt3
  source 1..2750: mol_type = other RNA
aggagagtcccgcagtcggcgtccagcggctctgcttgttcgtgtgtgtgtcgttgcaggccttattcaagcttaccatgagaatccccgtggacgccagcacctccaggcggttcacacctccatctactgctctgtcaccgggcaagatgagtgaggcactcccccttggggcccctgatgcgggagctgccctggcaggtaaattgcgcagcggcgaccgatccatggtcgaagttttagccgatcacccaggggagctggtgcgtacggactctcccaactttctatgctcggtactccctacccattggagatgtaataagacactgccaattgctttcaaagtggtcgcacttggagatgtgcccgacggcactctggttaccgtgatggccggtaacgatgaaaattactcagctgagttgaggaacgccacagcggcaatgaagaatcaggtcgcccggtttaacgacctccgcttcgtggggagaagcggaaggggcaaaagttttaccctgactataacagtattcaccaatcctccacaagttgctacgtatcaccgggccatcaagattactgtggatggcccgcgcgaaccccgaagacataggcagaagctggacgatcagaccaaacctgggtccctctcttttagcgagcggttatccgagctggaacagcttcgtcgcacagcaatgagagtctcaccacaccatcccgctcctactccaaaccccagggccagtttgaatcacagcaccgcgttcaacccgcaacctcagtctcagatgcagatcggacccgagaagcgggtgccagccatgcctggttcccccgtggaagtcaaaattcaatcacgaagcagtccacccacaatgcctccactgccgcccatcaatcctggcgggccacgccccgtttcttttacccctacggcactatccaacggaataaatcacagcccacccactctcaacggcgctccgtcgcctccacagagattctctaatggtcccgcctcctcaacaagtagcgctctgaccaaccagcagcttcctgccacttgcggggcaaggcaactgtccaagttgaaacggtttctcacaaccctgcagcagttcggaaacgacatctctcccgagattggcgagaaggtgcgcacgttagtactggccctcgtgaatagcaccgtcacaatcgaagagtttcattgtaagctacaagaagctactaacttcccactgagacctttcgtgattccctttttgaaagcgaatctaccactgctccagagggagctgcttcactgcgcacgtgccgctaagcagaccccgtcacagtacctggcccaacatgaacacttgctcctgaacacaagtatcgcatcccctgccgatagctctgagttactgatggaggttcacggcaatgggaaacggccctcaccagaacgaagagaggaaaacagtttcgacagggacactatagctcccgagcctccagccaagcgcgtgtgtaccattagccccgcacctcggcattccccggcgctaacagtcccactcatgaatcccggaggtcagtttcaccctaccccaccccctctgcagcattatactcttgaagatatcgctacgtctcacttgtacagagagccgaacaaaatgctggagcatagggaagtgcgcgaccgacaccactcgctcggcctgaatgggggatatcaggatgagcttgtagaccatcggctgacagaacgtgagtgggccgatgaatggaagcacttggaccatgcactcaactgcattatggagatggttgagaaaaccagaaggagcatggccgtgctgcgccggtgtcaagaatccgatagagaggaattaaattactggaagaggcgatataacgagaatactgagctgcgcaagaccggcacagaacttgtctcacggcagcacagtcccggttctgctgacagcctctccaacgattcacagagagagttcaatagcaggccagggaccggctacgtgcctgtcgaattttggaaaaagactgaggaagccgtgaacaaagttaagatccaggcaatgtctgaggtgcaaaaagctgtagccgaggcggaacagaaggccttcgaggtcatcgctacagaacgtgcacgcatggagcagacgattgccgacgtgaagcggcaggctgccgaagatgcatttctggttataaacgagcaagaggaatccaccgagaattgctggaactgtggaagaaaagcgagtgaaacttgcagcggctgtaatatcgccaggtactgcgggtctttctgccagcacaaggactgggagcgacatcaccggctttgtggacagaacttgcatggtcaatcaccccacggccaggggcgcccactgctccctgtgggaagaggctccagtgctaggagcgccgactgctcggtcccctccccagcactggataaaacatctgctaccacaagccggtcaagtactccggcctccgtgaccgcaattgacacgaatggtttatgaggactagtccctgttcccagagcccacttttttttctttttttgaaataaaatagcctgtctttcagatctcaaaggctcttttcagagccaccaaaaaaaaaaaaaaaaaaaaaaaaaaaaaaaaaaaaaaaaaaaaaaaaaaaaaaaaaaaaaaaaaaaaaaaaaaaaaaaaaaaaaaaaaaaaaaaaaaaaa

SEQ ID NO: 858 - RNA, 1634 nt, synthetic construct
  misc_feature 1..1634: note = Homo sapiens__Q01196-1__RUNX1(K83E_R174Q) mRNA opt4
  source 1..1634: mol_type = other RNA
aggagagtcccgcagtcggcgtccagcggctctgcttgttcgtgtgtgtgtcgttgcaggccttattcaagcttaccatgagaatccccgtggacgccagcaccagcagaagattcaccccccccagcaccgccctgagccccggcaagatgagcgaggccctgcccctgggcgcccccgacgccggcgccgccctggccggcaagctgagaagcggcgacagaagcatggtggaggtgctggccgaccaccccggcgagctggtgagaaccgacagccccaacttcctgtgcagcgtgctgcccacccactggagatgcaacgagaccctgcccatcgccttcaaggtggtggccctgggcgacgtgcccgacggcaccctggtgaccgtgatggccggcaacgacgagaactacagcgccgagctgagaaacgccaccgccgccatgaagaaccaggtggccagattcaacgacctgagattcgtgggcagaagcggcagaggcaagagcttcaccctgaccatcaccgtgttcaccaaccccccccaggtggccacctaccacagagccatcaagatcaccgtggacggcccccaggagcccagaagacacagacagaagctggacgaccagaccaagcccggcagcctgagcttcagcgagagactgagcgagctggagcagctgagaagaaccgccatgagagtgagcccccaccaccccgcccccacccccaaccccagagccagcctgaaccacagcaccgccttcaacccccagccccagagccagatgcaggacaccagacagatccagcccagccccccctggagctacgaccagagctaccagtacctgggcagcatcgccagccccagcgtgcaccccgccacccccatcagccccggcagagccagcggcatgaccaccctgagcgccgagctgagcagcagactgagcaccgcccccgacctgaccgccttcagcgaccccagacagttccccgccctgcccagcatcagcgaccccagaatgcactaccccggcgccttcacctacagccccacccccgtgaccagcggcatcggcatcggcatgagcgccatgggcagcgccaccagataccacacctacctgccccccccctaccccggcagcagccaggcccagggcggccccttccaggccagcagccccagctaccacctgtactacggcgccagcgccggcagctaccagttcagcatggtgggcggcgagagaagcccccccagaatcctgcccccctgcaccaacgccagcaccggcagcgccctgctgaaccccagcctgcccaaccagagcgacgtggtggaggccgagggcagccacagcaacagccccaccaacatggcccccagcgccagactggaggaggccgtgtggagaccctactgaggactagtccctgttcccagagcccacttttttttctttttttgaaataaaatagcctgtctttcagatctcaaaggctcttttcagagccaccaaaaaaaaaaaaaaaaaaaaaaaaaaaaaaaaaaaaaaaaaaaaaaaaaaaaaaaaaaaaaaaaaaaaaaaaaaaaaaaaaaaaaaaaaaaaaaaaaaaaa

SEQ ID NO: 859 - RNA, 2108 nt, synthetic construct
  misc_feature 1..2108: note = Homo sapiens____CBFbeta(1-165)_SMMHC(1527-1972) mRNA opt4
  source 1..2108: mol_type = other RNA
aggagagtcccgcagtcggcgtccagcggctctgcttgttcgtgtgtgtgtcgttgcaggccttattcaagcttaccatgcccagagtggtgcccgaccagagaagcaagttcgagaacgaggagttcttcagaaagctgagcagagagtgcgagatcaagtacaccggcttcagagacagaccccacgaggagagacaggccagattccagaacgcctgcagagacggcagaagcgagatcgccttcgtggccaccggcaccaacctgagcctgcagttcttccccgccagctggcagggcgagcagagacagacccccagcagagagtacgtggacctggagagagaggccggcaaggtgtacctgaaggcccccatgatcctgaacggcgtgtgcgtgatctggaagggctggatcgacctgcagagactggacggcatgggctgcctggagttcgacgaggagagagcccagcaggaggacgccctggcccagcaggccttcgaggaggccagaagaagaaccagagagttcgaggacagagacagaagccacagagaggagatggaggtgcacgagctggagaagagcaagagagccctggagacccagatggaggagatgaagacccagctggaggagctggaggacgagctgcaggccaccgaggacgccaagctgagactggaggtgaacatgcaggccctgaagggccagttcgagagagacctgcaggccagagacgagcagaacgaggagaagagaagacagctgcagagacagctgcacgagtacgagaccgagctggaggacgagagaaagcagagagccctggccgccgccgccaagaagaagctggagggcgacctgaaggacctggagctgcaggccgacagcgccatcaagggcagagaggaggccatcaagcagctgagaaagctgcaggcccagatgaaggacttccagagagagctggaggacgccagagccagcagagacgagatcttcgccaccgccaaggagaacgagaagaaggccaagagcctggaggccgacctgatgcagctgcaggaggacctggccgccgccgagagagccagaaagcaggccgacctggagaaggaggagctggccgaggagctggccagcagcctgagcggcagaaacgccctgcaggacgagaagagaagactggaggccagaatcgcccagctggaggaggagctggaggaggagcagggcaacatggaggccatgagcgacagagtgagaaaggccacccagcaggccgagcagctgagcaacgagctggccaccgagagaagcaccgcccagaagaacgagagcgccagacagcagctggagagacagaacaaggagctgagaagcaagctgcacgagatggagggcgccgtgaagagcaagttcaagagcaccatcgccgccctggaggccaagatcgcccagctggaggagcaggtggagcaggaggccagagagaagcaggccgccaccaagagcctgaagcagaaggacaagaagctgaaggagatcctgctgcaggtggaggacgagagaaagatggccgagcagtacaaggagcaggccgagaagggcaacgccagagtgaagcagctgaagagacagctggaggaggccgaggaggagagccagagaatcaacgccaacagaagaaagctgcagagagagctggacgaggccaccgagagcaacgaggccatgggcagagaggtgaacgccctgaagagcaagctgagaagaggcaacgagaccagcttcgtgcccagcagaagaagcggcggcagaagagtgatcgagaacgccgacggcagcgaggaggagaccgacaccagagacgccgacttcaacggcaccaaggccagcgagtgaggactagtccctgttcccagagcccacttttttttctttttttgaaataaaatagcctgtctttcagatctcaaaggctcttttcagagccaccaaaaaaaaaaaaaaaaaaaaaaaaaaaaaaaaaaaaaaaaaaaaaaaaaaaaaaaaaaaaaaaaaaaaaaaaaaaaaaaaaaaaaaaaaaaaaaaaaaaaa

SEQ ID NO: 860 - RNA, 1823 nt, synthetic construct
  misc_feature 1..1823: note = Artificial____CBFbeta(1-165)_SMMHC(1527-1877) mRNA opt4
  source 1..1823: mol_type = other RNA
aggagagtcccgcagtcggcgtccagcggctctgcttgttcgtgtgtgtgtcgttgcaggccttattcaagcttaccatgcccagagtggtgcccgaccagagaagcaagttcgagaacgaggagttcttcagaaagctgagcagagagtgcgagatcaagtacaccggcttcagagacagaccccacgaggagagacaggccagattccagaacgcctgcagagacggcagaagcgagatcgccttcgtggccaccggcaccaacctgagcctgcagttcttccccgccagctggcagggcgagcagagacagacccccagcagagagtacgtggacctggagagagaggccggcaaggtgtacctgaaggcccccatgatcctgaacggcgtgtgcgtgatctggaagggctggatcgacctgcagagactggacggcatgggctgcctggagttcgacgaggagagagcccagcaggaggacgccctggcccagcaggccttcgaggaggccagaagaagaaccagagagttcgaggacagagacagaagccacagagaggagatggaggtgcacgagctggagaagagcaagagagccctggagacccagatggaggagatgaagacccagctggaggagctggaggacgagctgcaggccaccgaggacgccaagctgagactggaggtgaacatgcaggccctgaagggccagttcgagagagacctgcaggccagagacgagcagaacgaggagaagagaagacagctgcagagacagctgcacgagtacgagaccgagctggaggacgagagaaagcagagagccctggccgccgccgccaagaagaagctggagggcgacctgaaggacctggagctgcaggccgacagcgccatcaagggcagagaggaggccatcaagcagctgagaaagctgcaggcccagatgaaggacttccagagagagctggaggacgccagagccagcagagacgagatcttcgccaccgccaaggagaacgagaagaaggccaagagcctggaggccgacctgatgcagctgcaggaggacctggccgccgccgagagagccagaaagcaggccgacctggagaaggaggagctggccgaggagctggccagcagcctgagcggcagaaacgccctgcaggacgagaagagaagactggaggccagaatcgcccagctggaggaggagctggaggaggagcagggcaacatggaggccatgagcgacagagtgagaaaggccacccagcaggccgagcagctgagcaacgagctggccaccgagagaagcaccgcccagaagaacgagagcgccagacagcagctggagagacagaacaaggagctgagaagcaagctgcacgagatggagggcgccgtgaagagcaagttcaagagcaccatcgccgccctggaggccaagatcgcccagctggaggagcaggtggagcaggaggccagagagaagcaggccgccaccaagagcctgaagcagaaggacaagaagctgaaggagatcctgctgcaggtggaggacgagagaaagatggccgagcagtacaaggagcaggccgagaagggcaacgcctgaggactagtccctgttcccagagcccacttttttttctttttttgaaataaaatagcctgtctttcagatctcaaaggctcttttcagagccaccaaaaaaaaaaaaaaaaaaaaaaaaaaaaaaaaaaaaaaaaaaaaaaaaaaaaaaaaaaaaaaaaaaaaaaaaaaaaaaaaaaaaaaaaaaaaaaaaaaaaa

SEQ ID NO: 861 - RNA, 884 nt, synthetic construct
  misc_feature 1..884: note = Artificial____CBFbeta(1-165)_Linker_Lifeact mRNA opt4
  source 1..884: mol_type = other RNA
aggagagtcccgcagtcggcgtccagcggctctgcttgttcgtgtgtgtgtcgttgcaggccttattcaagcttaccatgcccagagtggtgcccgaccagagaagcaagttcgagaacgaggagttcttcagaaagctgagcagagagtgcgagatcaagtacaccggcttcagagacagaccccacgaggagagacaggccagattccagaacgcctgcagagacggcagaagcgagatcgccttcgtggccaccggcaccaacctgagcctgcagttcttccccgccagctggcagggcgagcagagacagacccccagcagagagtacgtggacctggagagagaggccggcaaggtgtacctgaaggcccccatgatcctgaacggcgtgtgcgtgatctggaagggctggatcgacctgcagagactggacggcatgggctgcctggagttcgacgaggagagagcccagcaggaggacgccctggcccagcaggccttcgaggaggccagaagaagaaccagagagttcgaggacagagacagaagccacagagaggagatggagggcggcagcggcggcagcggcggcagcggcggcagcggcggcggcggcgtggccgacctgatcaagaagttcgagagcatcagcaaggaggagggcgacccccccgtggccacctgaggactagtccctgttcccagagcccacttttttttctttttttgaaataaaatagcctgtctttcagatctcaaaggctcttttcagagccaccaaaaaaaaaaaaaaaaaaaaaaaaaaaaaaaaaaaaaaaaaaaaaaaaaaaaaaaaaaaaaaaaaaaaaaaaaaaaaaaaaaaaaaaaaaaaaaaaaaaaa

SEQ ID NO: 862 - RNA, 851 nt, synthetic construct
  misc_feature 1..851: note = Artificial____CBFbeta(1-165)_HIF1alpha(549-575) mRNA opt4
  source 1..851: mol_type = other RNA
aggagagtcccgcagtcggcgtccagcggctctgcttgttcgtgtgtgtgtcgttgcaggccttattcaagcttaccatgcccagagtggtgcccgaccagagaagcaagttcgagaacgaggagttcttcagaaagctgagcagagagtgcgagatcaagtacaccggcttcagagacagaccccacgaggagagacaggccagattccagaacgcctgcagagacggcagaagcgagatcgccttcgtggccaccggcaccaacctgagcctgcagttcttccccgccagctggcagggcgagcagagacagacccccagcagagagtacgtggacctggagagagaggccggcaaggtgtacctgaaggcccccatgatcctgaacggcgtgtgcgtgatctggaagggctggatcgacctgcagagactggacggcatgggctgcctggagttcgacgaggagagagcccagcaggaggacgccctggcccagcaggccttcgaggaggccagaagaagaaccagagagttcgaggacagagacagaagccacagagaggagatggagcccttcagcacccaggacaccgacctggacctggagatgctggccccctacatccccatggacgacgacttccagctgagatgaggactagtccctgttcccagagcccacttttttttctttttttgaaataaaatagcctgtctttcagatctcaaaggctcttttcagagccaccaaaaaaaaaaaaaaaaaaaaaaaaaaaaaaaaaaaaaaaaaaaaaaaaaaaaaaaaaaaaaaaaaaaaaaaaaaaaaaaaaaaaaaaaaaaaaaaaaaaaa

SEQ ID NO: 863 - RNA, 896 nt, synthetic construct
  misc_feature 1..896: note Artificial____CBFbeta(1-165)_Linker_HIF1alpha(549-575) mRNA opt4
  source 1..896: mol_type = other RNA
aggagagtcccgcagtcggcgtccagcggctctgcttgttcgtgtgtgtgtcgttgcaggccttattcaagcttaccatgcccagagtggtgcccgaccagagaagcaagttcgagaacgaggagttcttcagaaagctgagcagagagtgcgagatcaagtacaccggcttcagagacagaccccacgaggagagacaggccagattccagaacgcctgcagagacggcagaagcgagatcgccttcgtggccaccggcaccaacctgagcctgcagttcttccccgccagctggcagggcgagcagagacagacccccagcagagagtacgtggacctggagagagaggccggcaaggtgtacctgaaggcccccatgatcctgaacggcgtgtgcgtgatctggaagggctggatcgacctgcagagactggacggcatgggctgcctggagttcgacgaggagagagcccagcaggaggacgccctggcccagcaggccttcgaggaggccagaagaagaaccagagagttcgaggacagagacagaagccacagagaggagatggagggcggcagcggcggcagcggcggcagcggcggcagcggcggcggccccttcagcacccaggacaccgacctggacctggagatgctggccccctacatccccatggacgacgacttccagctgagatgaggactagtccctgttcccagagcccacttttttttctttttttgaaataaaatagcctgtctttcagatctcaaaggctcttttcagagccaccaaaaaaaaaaaaaaaaaaaaaaaaaaaaaaaaaaaaaaaaaaaaaaaaaaaaaaaaaaaaaaaaaaaaaaaaaaaaaaaaaaaaaaaaaaaaaaaaaaaaa

SEQ ID NO: 864 - RNA, 2531 nt, synthetic construct
  misc_feature 1..2531: note = Artificial____RUNX1(1-177)_N_RUNX1T1a(31-604) mRNA opt4
  source 1..2531: mol_type = other RNA
aggagagtcccgcagtcggcgtccagcggctctgcttgttcgtgtgtgtgtcgttgcaggccttattcaagcttaccatgagaatccccgtggacgccagcaccagcagaagattcaccccccccagcaccgccctgagccccggcaagatgagcgaggccctgcccctgggcgcccccgacgccggcgccgccctggccggcaagctgagaagcggcgacagaagcatggtggaggtgctggccgaccaccccggcgagctggtgagaaccgacagccccaacttcctgtgcagcgtgctgcccacccactggagatgcaacaagaccctgcccatcgccttcaaggtggtggccctgggcgacgtgcccgacggcaccctggtgaccgtgatggccggcaacgacgagaactacagcgccgagctgagaaacgccaccgccgccatgaagaaccaggtggccagattcaacgacctgagattcgtgggcagaagcggcagaggcaagagcttcaccctgaccatcaccgtgttcaccaaccccccccaggtggccacctaccacagagccatcaagatcaccgtggacggccccagagagcccagaaacagaaccgagaagcacagcaccatgcccgacagccccgtggacgtgaagacccagagcagactgaccccccccaccatgccccccccccccaccacccagggcgcccccagaaccagcagcttcacccccaccaccctgaccaacggcaccagccacagccccaccgccctgaacggcgcccccagcccccccaacggcttcagcaacggccccagcagcagcagcagcagcagcctggccaaccagcagctgccccccgcctgcggcgccagacagctgagcaagctgaagagattcctgaccaccctgcagcagttcggcaacgacatcagccccgagatcggcgagagagtgagaaccctggtgctgggcctggtgaacagcaccctgaccatcgaggagttccacagcaagctgcaggaggccaccaacttccccctgagacccttcgtgatccccttcctgaaggccaacctgcccctgctgcagagagagctgctgcactgcgccagactggccaagcagaaccccgcccagtacctggcccagcacgagcagctgctgctggacgccagcaccaccagccccgtggacagcagcgagctgctgctggacgtgaacgagaacggcaagagaagaacccccgacagaaccaaggagaacggcttcgacagagagcccctgcacagcgagcaccccagcaagagaccctgcaccatcagccccggccagagatacagccccaacaacggcctgagctaccagcccaacggcctgccccaccccacccccccccccccccagcactacagactggacgacatggccatcgcccaccactacagagacagctacagacaccccagccacagagacctgagagacagaaacagacccatgggcctgcacggcaccagacaggaggagatgatcgaccacagactgaccgacagagagtgggccgaggagtggaagcacctggaccacctgctgaactgcatcatggacatggtggagaagaccagaagaagcctgaccgtgctgagaagatgccaggaggccgacagagaggagctgaactactggatcagaagatacagcgacgccgaggacctgaagaagggcggcggcagcagcagcagccacagcagacagcagagccccgtgaaccccgaccccgtggccctggacgcccacagagagttcctgcacagacccgccagcggctacgtgcccgaggagatctggaagaaggccgaggaggccgtgaacgaggtgaagagacaggccatgaccgagctgcagaaggccgtgagcgaggccgagagaaaggcccacgacatgatcaccaccgagagagccaagatggagagaaccgtggccgaggccaagagacaggccgccgaggacgccctggccgtgatcaaccagcaggaggacagcagcgagagctgctggaactgcggcagaaaggccagcgagacctgcagcggctgcaacaccgccagatactgcggcagcttctgccagcacaaggactgggagaagcaccaccacatctgcggccagaccctgcaggcccagcagcagggcgacacccccgccgtgagcagcagcgtgacccccaacagcggcgccggcagccccatggacaccccccccgccgccacccccagaagcaccacccccggcacccccagcaccatcgagaccacccccagatgaggactagtccctgttcccagagcccacttttttttctttttttgaaataaaatagcctgtctttcagatctcaaaggctcttttcagagccaccaaaaaaaaaaaaaaaaaaaaaaaaaaaaaaaaaaaaaaaaaaaaaaaaaaaaaaaaaaaaaaaaaaaaaaaaaaaaaaaaaaaaaaaaaaaaaaaaaaaaa

SEQ ID NO: 865 - RNA, 1046 nt, synthetic construct
  misc_feature 1..1046: note = Artificial____RUNX1(1-241)_RUNX1T1b(short) mRNA opt4
  source 1..1046: mol_type = other RNA
aggagagtcccgcagtcggcgtccagcggctctgcttgttcgtgtgtgtgtcgttgcaggccttattcaagcttaccatgagaatccccgtggacgccagcaccagcagaagattcaccccccccagcaccgccctgagccccggcaagatgagcgaggccctgcccctgggcgcccccgacgccggcgccgccctggccggcaagctgagaagcggcgacagaagcatggtggaggtgctggccgaccaccccggcgagctggtgagaaccgacagccccaacttcctgtgcagcgtgctgcccacccactggagatgcaacaagaccctgcccatcgccttcaaggtggtggccctgggcgacgtgcccgacggcaccctggtgaccgtgatggccggcaacgacgagaactacagcgccgagctgagaaacgccaccgccgccatgaagaaccaggtggccagattcaacgacctgagattcgtgggcagaagcggcagaggcaagagcttcaccctgaccatcaccgtgttcaccaaccccccccaggtggccacctaccacagagccatcaagatcaccgtggacggccccagagagcccagaagacacagacagaagctggacgaccagaccaagcccggcagcctgagcttcagcgagagactgagcgagctggagcagctgagaagaaccgccatgagagtgagcccccaccaccccgcccccacccccaaccccagagccagcctgaaccacagcaccgccttcaacccccagccccagagccagatgcaggaggtgggcttctgccacgtggcccaggtgggcctgaagctgctgggctgaggactagtccctgttcccagagcccacttttttttctttttttgaaataaaatagcctgtctttcagatctcaaaggctcttttcagagccaccaaaaaaaaaaaaaaaaaaaaaaaaaaaaaaaaaaaaaaaaaaaaaaaaaaaaaaaaaaaaaaaaaaaaaaaaaaaaaaaaaaaaaaaaaaaaaaaaaaaaa

SEQ ID NO: 866 - RNA, 2750 nt, synthetic construct
  misc_feature 1..2750: note = Artificial____RUNX1(1-241)_V_RUNX1T1b(22-604) mRNA opt4
  source 1..2750: mol_type = other RNA
aggagagtcccgcagtcggcgtccagcggctctgcttgttcgtgtgtgtgtcgttgcaggccttattcaagcttaccatgagaatccccgtggacgccagcaccagcagaagattcaccccccccagcaccgccctgagccccggcaagatgagcgaggccctgcccctgggcgcccccgacgccggcgccgccctggccggcaagctgagaagcggcgacagaagcatggtggaggtgctggccgaccaccccggcgagctggtgagaaccgacagccccaacttcctgtgcagcgtgctgcccacccactggagatgcaacaagaccctgcccatcgccttcaaggtggtggccctgggcgacgtgcccgacggcaccctggtgaccgtgatggccggcaacgacgagaactacagcgccgagctgagaaacgccaccgccgccatgaagaaccaggtggccagattcaacgacctgagattcgtgggcagaagcggcagaggcaagagcttcaccctgaccatcaccgtgttcaccaaccccccccaggtggccacctaccacagagccatcaagatcaccgtggacggccccagagagcccagaagacacagacagaagctggacgaccagaccaagcccggcagcctgagcttcagcgagagactgagcgagctggagcagctgagaagaaccgccatgagagtgagcccccaccaccccgcccccacccccaaccccagagccagcctgaaccacagcaccgccttcaacccccagccccagagccagatgcaggtgggccccgagaagagagtgcccgccatgcccggcagccccgtggaggtgaagatccagagcagaagcagcccccccaccatgccccccctgccccccatcaaccccggcggccccagacccgtgagcttcacccccaccgccctgagcaacggcatcaaccacagcccccccaccctgaacggcgcccccagccccccccagagattcagcaacggccccgccagcagcaccagcagcgccctgaccaaccagcagctgcccgccacctgcggcgccagacagctgagcaagctgaagagattcctgaccaccctgcagcagttcggcaacgacatcagccccgagatcggcgagaaggtgagaaccctggtgctggccctggtgaacagcaccgtgaccatcgaggagttccactgcaagctgcaggaggccaccaacttccccctgagacccttcgtgatccccttcctgaaggccaacctgcccctgctgcagagagagctgctgcactgcgccagagccgccaagcagacccccagccagtacctggcccagcacgagcacctgctgctgaacaccagcatcgccagccccgccgacagcagcgagctgctgatggaggtgcacggcaacggcaagagacccagccccgagagaagagaggagaacagcttcgacagagacaccatcgcccccgagccccccgccaagagagtgtgcaccatcagccccgcccccagacacagccccgccctgaccgtgcccctgatgaaccccggcggccagttccaccccacccccccccccctgcagcactacaccctggaggacatcgccaccagccacctgtacagagagcccaacaagatgctggagcacagagaggtgagagacagacaccacagcctgggcctgaacggcggctaccaggacgagctggtggaccacagactgaccgagagagagtgggccgacgagtggaagcacctggaccacgccctgaactgcatcatggagatggtggagaagaccagaagaagcatggccgtgctgagaagatgccaggagagcgacagagaggagctgaactactggaagagaagatacaacgagaacaccgagctgagaaagaccggcaccgagctggtgagcagacagcacagccccggcagcgccgacagcctgagcaacgacagccagagagagttcaacagcagacccggcaccggctacgtgcccgtggagttctggaagaagaccgaggaggccgtgaacaaggtgaagatccaggccatgagcgaggtgcagaaggccgtggccgaggccgagcagaaggccttcgaggtgatcgccaccgagagagccagaatggagcagaccatcgccgacgtgaagagacaggccgccgaggacgccttcctggtgatcaacgagcaggaggagagcaccgagaactgctggaactgcggcagaaaggccagcgagacctgcagcggctgcaacatcgccagatactgcggcagcttctgccagcacaaggactgggagagacaccacagactgtgcggccagaacctgcacggccagagcccccacggccagggcagacccctgctgcccgtgggcagaggcagcagcgccagaagcgccgactgcagcgtgcccagccccgccctggacaagaccagcgccaccaccagcagaagcagcacccccgccagcgtgaccgccatcgacaccaacggcctgtgaggactagtccctgttcccagagcccacttttttttctttttttgaaataaaatagcctgtctttcagatctcaaaggctcttttcagagccaccaaaaaaaaaaaaaaaaaaaaaaaaaaaaaaaaaaaaaaaaaaaaaaaaaaaaaaaaaaaaaaaaaaaaaaaaaaaaaaaaaaaaaaaaaaaaaaaaaaaaa

SEQ ID NO: 867 - RNA, 2750 nt, synthetic construct
  misc_feature 1..2750: note = Artificial____RUNX1(1-241)_I_RUNX1T1b(22-604) mRNA opt4
  source 1..2750: mol_type = other RNA
aggagagtcccgcagtcggcgtccagcggctctgcttgttcgtgtgtgtgtcgttgcaggccttattcaagcttaccatgagaatccccgtggacgccagcaccagcagaagattcaccccccccagcaccgccctgagccccggcaagatgagcgaggccctgcccctgggcgcccccgacgccggcgccgccctggccggcaagctgagaagcggcgacagaagcatggtggaggtgctggccgaccaccccggcgagctggtgagaaccgacagccccaacttcctgtgcagcgtgctgcccacccactggagatgcaacaagaccctgcccatcgccttcaaggtggtggccctgggcgacgtgcccgacggcaccctggtgaccgtgatggccggcaacgacgagaactacagcgccgagctgagaaacgccaccgccgccatgaagaaccaggtggccagattcaacgacctgagattcgtgggcagaagcggcagaggcaagagcttcaccctgaccatcaccgtgttcaccaaccccccccaggtggccacctaccacagagccatcaagatcaccgtggacggccccagagagcccagaagacacagacagaagctggacgaccagaccaagcccggcagcctgagcttcagcgagagactgagcgagctggagcagctgagaagaaccgccatgagagtgagcccccaccaccccgcccccacccccaaccccagagccagcctgaaccacagcaccgccttcaacccccagccccagagccagatgcagatcggccccgagaagagagtgcccgccatgcccggcagccccgtggaggtgaagatccagagcagaagcagcccccccaccatgccccccctgccccccatcaaccccggcggccccagacccgtgagcttcacccccaccgccctgagcaacggcatcaaccacagcccccccaccctgaacggcgcccccagccccccccagagattcagcaacggccccgccagcagcaccagcagcgccctgaccaaccagcagctgcccgccacctgcggcgccagacagctgagcaagctgaagagattcctgaccaccctgcagcagttcggcaacgacatcagccccgagatcggcgagaaggtgagaaccctggtgctggccctggtgaacagcaccgtgaccatcgaggagttccactgcaagctgcaggaggccaccaacttccccctgagacccttcgtgatccccttcctgaaggccaacctgcccctgctgcagagagagctgctgcactgcgccagagccgccaagcagacccccagccagtacctggcccagcacgagcacctgctgctgaacaccagcatcgccagccccgccgacagcagcgagctgctgatggaggtgcacggcaacggcaagagacccagccccgagagaagagaggagaacagcttcgacagagacaccatcgcccccgagccccccgccaagagagtgtgcaccatcagccccgcccccagacacagccccgccctgaccgtgcccctgatgaaccccggcggccagttccaccccacccccccccccctgcagcactacaccctggaggacatcgccaccagccacctgtacagagagcccaacaagatgctggagcacagagaggtgagagacagacaccacagcctgggcctgaacggcggctaccaggacgagctggtggaccacagactgaccgagagagagtgggccgacgagtggaagcacctggaccacgccctgaactgcatcatggagatggtggagaagaccagaagaagcatggccgtgctgagaagatgccaggagagcgacagagaggagctgaactactggaagagaagatacaacgagaacaccgagctgagaaagaccggcaccgagctggtgagcagacagcacagccccggcagcgccgacagcctgagcaacgacagccagagagagttcaacagcagacccggcaccggctacgtgcccgtggagttctggaagaagaccgaggaggccgtgaacaaggtgaagatccaggccatgagcgaggtgcagaaggccgtggccgaggccgagcagaaggccttcgaggtgatcgccaccgagagagccagaatggagcagaccatcgccgacgtgaagagacaggccgccgaggacgccttcctggtgatcaacgagcaggaggagagcaccgagaactgctggaactgcggcagaaaggccagcgagacctgcagcggctgcaacatcgccagatactgcggcagcttctgccagcacaaggactgggagagacaccacagactgtgcggccagaacctgcacggccagagcccccacggccagggcagacccctgctgcccgtgggcagaggcagcagcgccagaagcgccgactgcagcgtgcccagccccgccctggacaagaccagcgccaccaccagcagaagcagcacccccgccagcgtgaccgccatcgacaccaacggcctgtgaggactagtccctgttcccagagcccacttttttttctttttttgaaataaaatagcctgtctttcagatctcaaaggctcttttcagagccaccaaaaaaaaaaaaaaaaaaaaaaaaaaaaaaaaaaaaaaaaaaaaaaaaaaaaaaaaaaaaaaaaaaaaaaaaaaaaaaaaaaaaaaaaaaaaaaaaaaaaa

SEQ ID NO: 868 - RNA, 1634 nt, synthetic construct
  misc_feature 1..1634: note = Homo sapiens__Q01196-1__RUNX1(K83E_R174Q) mRNA opt5
  source 1..1634: mol_type = other RNA
aggagagtcccgcagtcggcgtccagcggctctgcttgttcgtgtgtgtgtcgttgcaggccttattcaagcttaccatgagaatccccgtggacgccagcacctcccggcgcttcacacctccgtctacggctctgagccccggcaagatgtccgaggccctccctctgggggcgcccgatgctggagccgcccttgctggcaaactgagatctggggaccggagcatggtcgaagttctcgccgatcaccctggagagctggtgcgcaccgactcccccaactttctttgctctgtgctgcctacacattggagatgtaatgaaaccctcccgattgctttcaaggtcgtggccctgggcgatgttcccgacgggacactggtgaccgtcatggcgggaaacgatgagaattacagcgccgaactccggaacgctacagccgctatgaaaaatcaggtggcccgctttaacgacctgagattcgttggccggtccggccgcggaaagagctttacccttacgatcaccgtgttcacaaatcctccccaagtcgcgacctatcacagagccattaaaatcacagtggatgggcctcaggagccccggcgccatagacagaagctggacgatcagaccaagccgggctctctctcctttagcgagcggctgtctgaacttgagcaactgcgcagaacggctatgcgggtgtcccctcaccatcccgcccctacacccaaccccagagctagcctcaatcactctaccgccttcaaccctcagccgcagtcccagatgcaagacacacgccagattcagcccagccctccctggtcctacgatcagtcttatcaatacctggggagcatcgcctcccctagcgtccaccccgctaccccgatctctcctggacgggcgtccggcatgaccacactgagcgccgaactctctagcagactgtccacggctcccgaccttaccgccttttctgaccctcgccagttccccgccctgcctagcatttccgatccccggatgcattatccgggggcttttacatacagccctacccccgttacatctggaatcggcattggcatgtccgccatggggagcgcgaccagatatcacacgtacctgccccctccgtaccccggatcttcccaggctcaaggcgggcctttccaggccagctccccctcttatcatctctactatggagccagcgctggctcctaccagttttctatggtcgggggagagcgcagccctccccggatccttcctccctgcacaaatgcctccaccggcagcgctctgctcaacccgtctctgcctaatcagtccgacgtggtggaggccgaaggcagccactctaactcccccaccaatatggcgcctagcgccagactggaggaagctgtgtggcgcccctattgaggactagtccctgttcccagagcccacttttttttctttttttgaaataaaatagcctgtctttcagatctcaaaggctcttttcagagccaccaaaaaaaaaaaaaaaaaaaaaaaaaaaaaaaaaaaaaaaaaaaaaaaaaaaaaaaaaaaaaaaaaaaaaaaaaaaaaaaaaaaaaaaaaaaaaaaaaaaaa

SEQ ID NO: 869 - RNA, 2108 nt, synthetic construct
  misc_feature 1..2108: note = Homo sapiens____CBFbeta(1-165)_SMMHC(1527-1972) mRNA opt5
  source 1..2108: mol_type = other RNA
aggagagtcccgcagtcggcgtccagcggctctgcttgttcgtgtgtgtgtcgttgcaggccttattcaagcttaccatgcccagagtggtccctgaccagcggagcaagttcgagaacgaagagtttttccgcaaactgtccagagaatgcgagatcaagtacaccggctttcgggatcgcccgcacgaagagagacaagcccggttccagaatgcttgtcgcgacgggagatctgagattgcctttgttgcgacaggaacgaacctcagcctgcagttctttcccgcttcctggcagggcgaacaacggcagaccccttctcgcgagtatgtggatcttgaaagagaggccgggaaagtgtacctgaaggcccccatgatcctcaatggagtctgcgtgatttggaaaggctggatcgacctgcagcggcttgatgggatgggatgtctggagttcgacgaggaacgcgctcagcaagaagatgccctcgctcagcaggcctttgaggaagcgagacggcgcacaagagagttcgaggaccgggatagaagccatcgcgaagagatggaagttcacgagctggaaaagtccaagcgggccctggagacccagatggaggaaatgaaaacacaactcgaggaactggaggacgaacttcaggctaccgaggatgccaagctgagactcgaggtgaacatgcaggctctgaaaggccaatttgaacgcgaccttcaggcccgggatgagcagaatgaagagaagagacgccagctgcaacggcagctccatgagtatgaaacagagctggaagacgagagaaaacagcgcgcgctggccgctgccgctaagaagaaactcgaaggcgacctgaaggatcttgagctgcaggccgactctgccattaaagggcgggaggaagctatcaagcaactcagaaaactgcaggcgcagatgaaggatttccagcgcgagcttgaagacgcccgggctagcagagatgagatctttgccaccgccaaagaaaacgagaagaaggctaaatccctggaggccgacctcatgcaactgcaggaagatctggcggctgccgagcgggcccgcaagcaggctgacctcgaaaaagaggaactggccgaggagcttgctagctctctgtccggaagaaatgccctccaggatgaaaagcggagactggaggcgcgcattgcccaacttgaagaggagctggaagaggaacagggcaacatggaggctatgagcgaccgggtcagaaaagccacgcagcaagctgaacagctctctaatgagctggccaccgagcgctccacagcgcagaagaacgaaagcgccagacagcaactggagcggcagaataaggaactccgctctaaactgcacgagatggaaggggctgtgaagtccaaattcaagagcaccatcgccgctcttgaggccaaaattgcccagctggaggaacaggttgagcaagaagctagagagaagcaggcggccacaaagtccctcaaacagaaggataaaaagctgaaagaaatcctgcttcaggtggaggacgagcggaagatggctgaacaatacaaggagcaggccgaaaaaggaaacgcccgcgtcaagcagctcaaaagacaactggaggaggctgaagaggaatctcagcggattaatgccaaccgcagaaagctgcagcgggagctcgacgaagcgaccgagagcaatgaggctatgggccgcgaagtgaacgccctgaaatccaaacttagacgggggaacgagacgagcttcgtgccttctagacgctccggaggccggagagtcatcgaaaatgccgatggcagcgaggaagagacagacacccgcgatgctgactttaacgggacaaaggcctctgagtgaggactagtccctgttcccagagcccacttttttttctttttttgaaataaaatagcctgtctttcagatctcaaaggctcttttcagagccaccaaaaaaaaaaaaaaaaaaaaaaaaaaaaaaaaaaaaaaaaaaaaaaaaaaaaaaaaaaaaaaaaaaaaaaaaaaaaaaaaaaaaaaaaaaaaaaaaaaaaa

SEQ ID NO: 870 - RNA, 1823 nt, synthetic construct
  misc_feature 1..1823: note = Artificial____CBFbeta(1-165)_SMMHC(1527-1877) mRNA opt5
  source 1..1823: mol_type = other RNA
aggagagtcccgcagtcggcgtccagcggctctgcttgttcgtgtgtgtgtcgttgcaggccttattcaagcttaccatgcccagagtggtccctgaccagcggagcaagttcgagaacgaagagtttttccgcaaactgtccagagaatgcgagatcaagtacaccggctttcgggatcgcccgcacgaagagagacaagcccggttccagaatgcttgtcgcgacgggagatctgagattgcctttgttgcgacaggaacgaacctcagcctgcagttctttcccgcttcctggcagggcgaacaacggcagaccccttctcgcgagtatgtggatcttgaaagagaggccgggaaagtgtacctgaaggcccccatgatcctcaatggagtctgcgtgatttggaaaggctggatcgacctgcagcggcttgatgggatgggatgtctggagttcgacgaggaacgcgctcagcaagaagatgccctcgctcagcaggcctttgaggaagcgagacggcgcacaagagagttcgaggaccgggatagaagccatcgcgaagagatggaagttcacgagctggaaaagtccaagcgggccctggagacccagatggaggaaatgaaaacacaactcgaggaactggaggacgaacttcaggctaccgaggatgccaagctgagactcgaggtgaacatgcaggctctgaaaggccaatttgaacgcgaccttcaggcccgggatgagcagaatgaagagaagagacgccagctgcaacggcagctccatgagtatgaaacagagctggaagacgagagaaaacagcgcgcgctggccgctgccgctaagaagaaactcgaaggcgacctgaaggatcttgagctgcaggccgactctgccattaaagggcgggaggaagctatcaagcaactcagaaaactgcaggcgcagatgaaggatttccagcgcgagcttgaagacgcccgggctagcagagatgagatctttgccaccgccaaagaaaacgagaagaaggctaaatccctggaggccgacctcatgcaactgcaggaagatctggcggctgccgagcgggcccgcaagcaggctgacctcgaaaaagaggaactggccgaggagcttgctagctctctgtccggaagaaatgccctccaggatgaaaagcggagactggaggcgcgcattgcccaacttgaagaggagctggaagaggaacagggcaacatggaggctatgagcgaccgggtcagaaaagccacgcagcaagctgaacagctctctaatgagctggccaccgagcgctccacagcgcagaagaacgaaagcgccagacagcaactggagcggcagaataaggaactccgctctaaactgcacgagatggaaggggctgtgaagtccaaattcaagagcaccatcgccgctcttgaggccaaaattgcccagctggaggaacaggttgagcaagaagctagagagaagcaggcggccacaaagtccctcaaacagaaggataaaaagctgaaagaaatcctgcttcaggtggaggacgagcggaagatggctgaacaatacaaggagcaggccgaaaaaggaaacgcctgaggactagtccctgttcccagagcccacttttttttctttttttgaaataaaatagcctgtctttcagatctcaaaggctcttttcagagccaccaaaaaaaaaaaaaaaaaaaaaaaaaaaaaaaaaaaaaaaaaaaaaaaaaaaaaaaaaaaaaaaaaaaaaaaaaaaaaaaaaaaaaaaaaaaaaaaaaaaaa

SEQ ID NO: 871 - RNA, 884 nt, synthetic construct
  misc_feature 1..884: note = Artificial____CBFbeta(1-165)_Linker_Lifeact mRNA opt5
  source 1..884: mol_type = other RNA
aggagagtcccgcagtcggcgtccagcggctctgcttgttcgtgtgtgtgtcgttgcaggccttattcaagcttaccatgcccagagtggtccctgaccagcggagcaagttcgagaacgaagagtttttccgcaaactgtccagagaatgcgagatcaagtacaccggctttcgggatcgcccgcacgaagagagacaagcccggttccagaatgcttgtcgcgacgggagatctgagattgcctttgttgcgacaggaacgaacctcagcctgcagttctttcccgcttcctggcagggcgaacaacggcagaccccttctcgcgagtatgtggatcttgaaagagaggccgggaaagtgtacctgaaggcccccatgatcctcaatggagtctgcgtgatttggaaaggctggatcgacctgcagcggcttgatgggatgggatgtctggagttcgacgaggaacgcgctcagcaagaagatgccctcgctcagcaggcctttgaggaagcgagacggcgcacaagagagttcgaggaccgggatagaagccatcgcgaagagatggaaggcggctccgggggatctggcgggagcggaggctccgggggaggcggcgttgccgacctgattaagaagtttgagagcatctctaaagaagagggggatcctcccgtggctacctgaggactagtccctgttcccagagcccacttttttttctttttttgaaataaaatagcctgtctttcagatctcaaaggctcttttcagagccaccaaaaaaaaaaaaaaaaaaaaaaaaaaaaaaaaaaaaaaaaaaaaaaaaaaaaaaaaaaaaaaaaaaaaaaaaaaaaaaaaaaaaaaaaaaaaaaaaaaaaa

SEQ ID NO: 872 - RNA, 851 nt, synthetic construct
  misc_feature 1..851: note = Artificial____CBFbeta(1-165)_HIF1alpha(549-575) mRNA opt5
  source 1..851: mol_type = other RNA
aggagagtcccgcagtcggcgtccagcggctctgcttgttcgtgtgtgtgtcgttgcaggccttattcaagcttaccatgcccagagtggtccctgaccagcggagcaagttcgagaacgaagagtttttccgcaaactgtccagagaatgcgagatcaagtacaccggctttcgggatcgcccgcacgaagagagacaagcccggttccagaatgcttgtcgcgacgggagatctgagattgcctttgttgcgacaggaacgaacctcagcctgcagttctttcccgcttcctggcagggcgaacaacggcagaccccttctcgcgagtatgtggatcttgaaagagaggccgggaaagtgtacctgaaggcccccatgatcctcaatggagtctgcgtgatttggaaaggctggatcgacctgcagcggcttgatgggatgggatgtctggagttcgacgaggaacgcgctcagcaagaagatgccctcgctcagcaggcctttgaggaagcgagacggcgcacaagagagttcgaggaccgggatagaagccatcgcgaagagatggaacctttttccacccaggacacagatctggacctggagatgctcgccccctatattcctatggatgacgacttccaactgcggtgaggactagtccctgttcccagagcccacttttttttctttttttgaaataaaatagcctgtctttcagatctcaaaggctcttttcagagccaccaaaaaaaaaaaaaaaaaaaaaaaaaaaaaaaaaaaaaaaaaaaaaaaaaaaaaaaaaaaaaaaaaaaaaaaaaaaaaaaaaaaaaaaaaaaaaaaaaaaaa

SEQ ID NO: 873 - RNA, 896 nt, synthetic construct
  misc_feature 1..896: note Artificial____CBFbeta(1-165)_Linker_HIF1alpha(549-575) mRNA opt5
  source 1..896: mol_type = other RNA
aggagagtcccgcagtcggcgtccagcggctctgcttgttcgtgtgtgtgtcgttgcaggccttattcaagcttaccatgcccagagtggtccctgaccagcggagcaagttcgagaacgaagagtttttccgcaaactgtccagagaatgcgagatcaagtacaccggctttcgggatcgcccgcacgaagagagacaagcccggttccagaatgcttgtcgcgacgggagatctgagattgcctttgttgcgacaggaacgaacctcagcctgcagttctttcccgcttcctggcagggcgaacaacggcagaccccttctcgcgagtatgtggatcttgaaagagaggccgggaaagtgtacctgaaggcccccatgatcctcaatggagtctgcgtgatttggaaaggctggatcgacctgcagcggcttgatgggatgggatgtctggagttcgacgaggaacgcgctcagcaagaagatgccctcgctcagcaggcctttgaggaagcgagacggcgcacaagagagttcgaggaccgggatagaagccatcgcgaagagatggaaggcggctccgggggatctggcgggagcggaggctccgggggaggcccttttagcacccaggacacagatctggacctggagatgctcgccccctatattcctatggatgacgacttccaactgcggtgaggactagtccctgttcccagagcccacttttttttctttttttgaaataaaatagcctgtctttcagatctcaaaggctcttttcagagccaccaaaaaaaaaaaaaaaaaaaaaaaaaaaaaaaaaaaaaaaaaaaaaaaaaaaaaaaaaaaaaaaaaaaaaaaaaaaaaaaaaaaaaaaaaaaaaaaaaaaaa

SEQ ID NO: 874 - RNA, 2531 nt, synthetic construct
  misc_feature 1..2531: note = Artificial____RUNX1(1-177)_N_RUNX1T1a(31-604) mRNA opt5
  source 1..2531: mol_type = other RNA
aggagagtcccgcagtcggcgtccagcggctctgcttgttcgtgtgtgtgtcgttgcaggccttattcaagcttaccatgagaatccccgtggacgccagcacctcccggcgcttcacacctccgtctacggctctgagccccggcaagatgtccgaggccctccctctgggggcgcccgatgctggagccgcccttgctggcaaactgagatctggggaccggagcatggtcgaagttctcgccgatcaccctggagagctggtgcgcaccgactcccccaactttctttgctctgtgctgcctacacattggagatgtaataagaccctcccgattgctttcaaagtcgtggccctgggcgatgttcccgacgggacactggtgaccgtcatggcgggaaacgatgaaaattacagcgccgagctccggaacgctacagccgctatgaagaatcaggtggcccgctttaacgacctgagattcgttggccggtccggccgcgggaaatcttttacccttacgatcaccgtgttcacaaatcctccccaagtcgcgacctatcacagagccattaagatcacagtggatggacctcgggaaccccgcaacagaaccgagaagcattctacgatgccggactcccctgtggatgtcaaaacacagagccggctgacaccccctaccatgccccctcccccgaccacccagggcgctccccgcacatcttcctttacgcctaccacactcaccaatgggacaagccactctcccaccgccctgaacggagctccttccccgcccaatggcttcagcaacgggccttcctctagctccagcagctcccttgccaatcagcaactgccccctgcctgcggagctagacagctcagcaagctgaaacggtttctgacgacactccagcagttcggcaacgacatttctcccgagatcggcgaaagagttcgcaccctggtgcttgggctggtgaatagcaccctcacaatcgaggaatttcattccaagctgcaagaggcgaccaacttccctcttcggccctttgtcattccgttcctgaaagccaacctccctctgctgcagagagagctcctgcactgtgctcgccttgccaagcagaatcccgcccagtacctggctcaacacgaacagctcctgcttgatgcctctacaacgagccccgtggactccagcgagctgctcctggacgttaacgaaaatggaaagcggagaacccctgatcgcacaaaagagaacggcttcgaccgggaaccgctgcattctgagcacccctccaagagaccttgcaccatcagccccgggcagcgctattctcctaataacggactctcctaccaacccaatggcctgcctcatcccacaccgcctccccctcagcactatcggcttgatgacatggcgattgctcaccattacagagatagctatcgccacccctcccatcgggacctgagagatcggaaccgcccgatggggctccacggaaccagacaggaggaaatgatcgaccatcggctgacggatagagagtgggccgaagagtggaaacacctggaccaccttctcaattgtattatggatatggtggaaaagacccgccggtctctgacagtcctgagacgctgccaggaggccgacagagaggaactcaactactggatccggcgctacagcgacgctgaggatctgaaaaagggcggcgggtcctctagctcccatagcagacaacagtctcctgtgaatcccgaccctgttgcccttgatgctcaccgggaatttctgcatcgccccgcctccggatatgtgcccgaggaaatttggaaaaaggcggaggaggccgtcaacgaagtgaagagacaggctatgaccgagctccagaaagccgtcagcgaagctgagcggaaggcccacgacatgatcacaaccgagcgcgcgaaaatggaaagaacggtggccgaggctaagcggcaagccgctgaagatgccctggccgttatcaatcagcaggaggactcttccgaaagctgttggaactgcggccgcaaagctagcgagacatgtagcgggtgcaataccgcgagatactgtggatccttctgccagcacaaggattgggagaagcatcaccatatttgcggccaaacactgcaggcccagcagcaaggggacacccctgctgtgtcttcttccgtcaccccgaacagcggcgccggatcccccatggatacacctcccgccgctacgcctcggtctaccacacccggcacccctagcacaatcgaaaccacgccgagatgaggactagtccctgttcccagagcccacttttttttctttttttgaaataaaatagcctgtctttcagatctcaaaggctcttttcagagccaccaaaaaaaaaaaaaaaaaaaaaaaaaaaaaaaaaaaaaaaaaaaaaaaaaaaaaaaaaaaaaaaaaaaaaaaaaaaaaaaaaaaaaaaaaaaaaaaaaaaaa

SEQ ID NO: 875 - RNA, 1046 nt, synthetic construct
  misc_feature 1..1046: note = Artificial____RUNX1(1-241)_RUNX1T1b(short) mRNA opt5
  source 1..1046: mol_type = other RNA
aggagagtcccgcagtcggcgtccagcggctctgcttgttcgtgtgtgtgtcgttgcaggccttattcaagcttaccatgagaatccccgtggacgccagcacctcccggcgcttcacacctccgtctacggctctgagccccggcaagatgtccgaggccctccctctgggggcgcccgatgctggagccgcccttgctggcaaactgagatctggggaccggagcatggtcgaagttctcgccgatcaccctggagagctggtgcgcaccgactcccccaactttctttgctctgtgctgcctacacattggagatgtaataagaccctcccgattgctttcaaagtcgtggccctgggcgatgttcccgacgggacactggtgaccgtcatggcgggaaacgatgaaaattacagcgccgagctccggaacgctacagccgctatgaagaatcaggtggcccgctttaacgacctgagattcgttggccggtccggccgcgggaaatcttttacccttacgatcaccgtgttcacaaatcctccccaagtcgcgacctatcacagagccattaagatcacagtggatggacctcgggaaccccgcagacatcggcagaagctggacgatcagaccaaaccgggcagcctctcctttagcgagcgcctgtctgagcttgaacagctgagacggacggctatgagagtgtcccctcaccatcccgcccctacacccaacccccgcgctagcctcaatcactctaccgccttcaaccctcaaccgcagtcccagatgcaggaggtcgggttttgccacgttgcccaagtgggactgaagctgctcggctgaggactagtccctgttcccagagcccacttttttttctttttttgaaataaaatagcctgtctttcagatctcaaaggctcttttcagagccaccaaaaaaaaaaaaaaaaaaaaaaaaaaaaaaaaaaaaaaaaaaaaaaaaaaaaaaaaaaaaaaaaaaaaaaaaaaaaaaaaaaaaaaaaaaaaaaaaaaaaa

SEQ ID NO: 876 - RNA, 2750 nt, synthetic construct
  misc_feature 1..2750: note = Artificial____RUNX1(1-241)_V_RUNX1T1b(22-604) mRNA opt5
  source 1..2750: mol_type = other RNA
aggagagtcccgcagtcggcgtccagcggctctgcttgttcgtgtgtgtgtcgttgcaggccttattcaagcttaccatgagaatccccgtggacgccagcacctcccggcgcttcacacctccgtctacggctctgagccccggcaagatgtccgaggccctccctctgggggcgcccgatgctggagccgcccttgctggcaaactgagatctggggaccggagcatggtcgaagttctcgccgatcaccctggagagctggtgcgcaccgactcccccaactttctttgctctgtgctgcctacacattggagatgtaataagaccctcccgattgctttcaaagtcgtggccctgggcgatgttcccgacgggacactggtgaccgtcatggcgggaaacgatgaaaattacagcgccgagctccggaacgctacagccgctatgaagaatcaggtggcccgctttaacgacctgagattcgttggccggtccggccgcgggaaatcttttacccttacgatcaccgtgttcacaaatcctccccaagtcgcgacctatcacagagccattaagatcacagtggatggacctcgggaaccccgcagacatcggcagaagctggacgatcagaccaaaccgggcagcctctcctttagcgagcgcctgtctgagcttgaacagctgagacggacggctatgagagtgtcccctcaccatcccgcccctacacccaacccccgcgctagcctcaatcactctaccgccttcaaccctcaaccgcagtcccagatgcaggtcgggcccgagaagcgggttcctgccatgcccggaagccctgtggaagtgaaaattcaatccagatctagccctccgacaatgcctcccctgcctcccatcaatcctggcgggccccgcccggtctcctttacccctaccgctctgagcaacggaatcaatcactctcctcccacactcaacggcgcgccctccccgccccagcggttcagcaatggccctgcctctagcacgtcctctgctctgaccaaccagcagcttcccgccacatgcggggccagacaactgagcaagctcaaacgctttctgaccacacttcagcagttcggaaacgacatttcccctgagatcggcgagaaggtgcggaccctggttctcgctctggtgaatagcacggtcacaattgaagagtttcattgtaagctgcaagaagccaccaacttccccctcagacctttcgtgatcccctttctgaaagcgaatcttccgctgctccagcgcgagctgcttcactgcgctcgggccgccaagcagaccccttctcagtacctggctcaacatgaacacctcctgctgaacacatccattgccagccccgctgattcttccgagctcctgatggaggttcacgggaatggaaaaagacctagccccgaacgccgggaggaaaactccttcgacagagacaccatcgccccggagcctcccgcgaagcgggtgtgtacaatttctcctgctccccgccatagccccgcccttacggtccctctgatgaatccgggcgggcagtttcaccccacccctccccctctccagcattatacactggaagatatcgccacctcccacctgtacagagagcccaacaaaatgcttgagcatcgggaagtgagagaccgccaccactctctcggactgaatggcggctatcaggatgagctggtcgaccatcggctcacagaaagagagtgggctgatgaatggaagcacctggaccatgcccttaactgcatcatggagatggtggagaaaacccgcagaagcatggcggttctgcggcgctgtcaagaatccgatagagaggaactcaattactggaagcggcgctataacgagaatacggagctgagaaagaccgggacagaactggtgagccggcagcactctcctggatccgccgacagcctttctaacgattcccagcgcgagttcaatagcagaccgggcaccgggtacgtccccgtggaattttggaaaaagacagaggaagctgttaacaaagtgaagattcaggccatgtctgaggtccaaaaagctgtggccgaggccgaacagaaggctttcgaggtgatcgcgaccgaacgggcccgcatggagcagacgattgctgacgttaagagacaggccgccgaagatgcttttctcgtcatcaacgagcaagaggaaagcacagagaattgctggaactgtggacggaaagcctccgaaacctgcagcggctgtaatattgcgagatactgcgggtctttctgccagcacaaggactgggagcgccatcaccggctgtgtggccagaacctgcatggacaatcccctcacggccaggggagacccctcctgcctgtgggacgcggcagctccgctcggtctgccgactgcagcgtgccctccccggcccttgataaaacatctgctaccaccagcagatcctctacacccgccagcgtcacggcgatcgacaccaatgggctgtgaggactagtccctgttcccagagcccacttttttttctttttttgaaataaaatagcctgtctttcagatctcaaaggctcttttcagagccaccaaaaaaaaaaaaaaaaaaaaaaaaaaaaaaaaaaaaaaaaaaaaaaaaaaaaaaaaaaaaaaaaaaaaaaaaaaaaaaaaaaaaaaaaaaaaaaaaaaaaa

SEQ ID NO: 877 - RNA, 2750 nt, synthetic construct
  misc_feature 1..2750: note = Artificial____RUNX1(1-241)_I_RUNX1T1b(22-604) mRNA opt5
  source 1..2750: mol_type = other RNA
aggagagtcccgcagtcggcgtccagcggctctgcttgttcgtgtgtgtgtcgttgcaggccttattcaagcttaccatgagaatccccgtggacgccagcacctcccggcgcttcacacctccgtctacggctctgagccccggcaagatgtccgaggccctccctctgggggcgcccgatgctggagccgcccttgctggcaaactgagatctggggaccggagcatggtcgaagttctcgccgatcaccctggagagctggtgcgcaccgactcccccaactttctttgctctgtgctgcctacacattggagatgtaataagaccctcccgattgctttcaaagtcgtggccctgggcgatgttcccgacgggacactggtgaccgtcatggcgggaaacgatgaaaattacagcgccgagctccggaacgctacagccgctatgaagaatcaggtggcccgctttaacgacctgagattcgttggccggtccggccgcgggaaatcttttacccttacgatcaccgtgttcacaaatcctccccaagtcgcgacctatcacagagccattaagatcacagtggatggacctcgggaaccccgcagacatcggcagaagctggacgatcagaccaaaccgggcagcctctcctttagcgagcgcctgtctgagcttgaacagctgagacggacggctatgagagtgtcccctcaccatcccgcccctacacccaacccccgcgctagcctcaatcactctaccgccttcaaccctcaaccgcagtcccagatgcagattgggcccgagaagcgggtccctgccatgcccggaagccctgttgaagtgaaaatccaatccagatctagccctccgacaatgcctcccctgcctcccatcaatcctggcgggccccgcccggtgtcctttacccctaccgctctgagcaacggaattaatcactctcctcccacactcaacggcgcgccctccccgccccagcggttcagcaatggccctgcctctagcacgtcctctgctctgaccaaccagcagcttcccgccacatgcggggccagacaactgagcaagctcaaacgctttctgaccacacttcagcagttcggaaacgacatctcccctgagattggcgagaaggtccggaccctggtgctcgctctggttaatagcacggtgacaatcgaagagtttcattgtaagctgcaagaagccaccaacttccccctcagacctttcgtcattccctttctgaaagcgaatcttccgctgctccagcgcgagctgcttcactgcgctcgggccgccaagcagaccccttctcagtacctggctcaacatgaacacctcctgctgaacacatccatcgccagccccgctgattcttccgagctcctgatggaggtgcacgggaatggaaaaagacctagccccgaacgccgggaggaaaactccttcgacagagacaccattgccccggagcctcccgcgaagcgggtttgtacaatctctcctgctccccgccatagccccgcccttacggtgcctctgatgaatccgggcgggcagtttcaccccacccctccccctctccagcattatacactggaagatatcgccacctcccacctgtacagagagcccaacaaaatgcttgagcatcgggaagtcagagaccgccaccactctctcggactgaatggcggctatcaggatgagctggtggaccatcggctcacagaaagagagtgggctgatgaatggaagcacctggaccatgcccttaactgcattatggagatggtcgagaaaacccgcagaagcatggcggtgctgcggcgctgtcaagaatccgatagagaggaactcaattactggaagcggcgctataacgagaatacggagctgagaaagaccgggacagaactggttagccggcagcactctcctggatccgccgacagcctttctaacgattcccagcgcgagttcaatagcagaccgggcaccgggtacgtgcccgtcgaattttggaaaaagacagaggaagctgtgaacaaagttaagatccaggccatgtctgaggtgcaaaaagctgtcgccgaggccgaacagaaggctttcgaggtgattgcgaccgaacgggcccgcatggagcagacgatcgctgacgtgaagagacaggccgccgaagatgcttttctcgttattaacgagcaagaggaaagcacagagaattgctggaactgtggacggaaagcctccgaaacctgcagcggctgtaatatcgcgagatactgcgggtctttctgccagcacaaggactgggagcgccatcaccggctgtgtggccagaacctgcatggacaatcccctcacggccaggggagacccctcctgcctgtcggacgcggcagctccgctcggtctgccgactgcagcgtgccctccccggcccttgataaaacatctgctaccaccagcagatcctctacacccgccagcgtgacggcgatcgacaccaatgggctgtgaggactagtccctgttcccagagcccacttttttttctttttttgaaataaaatagcctgtctttcagatctcaaaggctcttttcagagccaccaaaaaaaaaaaaaaaaaaaaaaaaaaaaaaaaaaaaaaaaaaaaaaaaaaaaaaaaaaaaaaaaaaaaaaaaaaaaaaaaaaaaaaaaaaaaaaaaaaaaa

SEQ ID NO: 878 - RNA, 1634 nt, synthetic construct
  misc_feature 1..1634: note = Homo sapiens__Q01196-1__RUNX1(K83E_R174Q) mRNA opt11
  source 1..1634: mol_type = other RNA
aggagagtcccgcagtcggcgtccagcggctctgcttgttcgtgtgtgtgtcgttgcaggccttattcaagcttaccatgcgcatcccagtagacgcctcaacctcacgtcgcttcacccctccctcaacagccctctcacccggcaaaatgtccgaagcattacccctcggtgcccccgacgcaggcgcagcactcgccggcaaacttcgatctggcgaccgatccatggtcgaagtcctagccgaccaccccggcgaactcgtacgaacagactcacccaatttcctctgctccgtcctccccactcactggcgctgcaacgaaaccctgcccattgccttcaaagtcgtcgcacttggcgacgtcccagacggcaccctagtaacagtaatggccggaaacgacgaaaactactcagcagaactacgcaacgccaccgccgccatgaaaaaccaagtagcccgcttcaacgatctacgattcgtcggccgatccggacgtggcaaatccttcactcttacaatcacagtcttcacaaatcccccacaagtcgccacctaccaccgcgccatcaaaattaccgttgacggcccccaagaaccaagacgccatcgtcaaaaacttgacgaccaaaccaaacccggctcactatcattctccgaacgcctctccgaactcgaacaactccgccgcaccgccatgcgcgtctcaccccaccaccccgctcccacaccaaaccccagggcctcccttaaccactccaccgcattcaacccccaaccacaatcccaaatgcaagacacacgacaaatacaaccatccccaccgtggtcatacgaccaatcttaccaatacctcggttctatagcctccccatccgtccacccagccacacccatctcccccggccgcgcatccggaatgaccacactctcagccgaactctcctcccgcctatcaaccgcccctgacctcaccgccttttccgacccccgacaattccccgcactaccgtcaatctccgacccccgaatgcactatcccggcgccttcacctactcccccacacctgtaacctccggcatcggcatcggcatgtccgccatgggaagcgccaccagatatcatacttacctacccccaccttatccaggatcctcacaagcccaaggcggcccttttcaagcctcctccccctcctaccatctctactacggcgcctccgccggctcctaccaattctccatggtcggcggcgaacgatcaccaccccgaatcctccctccctgcaccaacgcatcgaccggatcggccctcttaaacccctccctccccaaccaatcagacgtcgtcgaagccgaaggatctcactccaactcccccacaaacatggcaccttcagcccgcctcgaagaagccgtctggcgcccctactaaggactagtccctgttcccagagcccacttttttttctttttttgaaataaaatagcctgtctttcagatctcaaaggctcttttcagagccaccaaaaaaaaaaaaaaaaaaaaaaaaaaaaaaaaaaaaaaaaaaaaaaaaaaaaaaaaaaaaaaaaaaaaaaaaaaaaaaaaaaaaaaaaaaaaaaaaaaaaa

SEQ ID NO: 879 - RNA, 2108 nt, synthetic construct
  misc_feature 1..2108: note = Homo sapiens____CBFbeta(1-165)_SMMHC(1527-1972) mRNA opt11
  source 1..2108: mol_type = other RNA
aggagagtcccgcagtcggcgtccagcggctctgcttgttcgtgtgtgtgtcgttgcaggccttattcaagcttaccatgccaagggtggtgcccgaccagagaagcaagttcgaaaatgaggaatttttccggaagctgagcagggaatgcgagataaaatacacgggcttccgagacagaccacacgaagagaggcaagcgaggttccaaaacgcctgcagagacggaagaagcgagatagcgttcgtggccacggggacgaacctgagcctacagttcttccctgcaagctggcaaggagaacagaggcagacaccgagtagggagtacgtggacctggagagggaggcggggaaggtgtacctgaaggcaccaatgatactaaatggagtatgtgtaatctggaagggatggatagacctgcaacggctggacgggatgggatgcctggagttcgacgaggaaagagcgcagcaagaggacgcgctggcacaacaggcgttcgaggaagcaaggaggcggacgcgagagttcgaggacagggataggagccacagagaggagatggaggtacacgagctagagaaaagcaagagggcgctggaaacacaaatggaggagatgaagacacagctggaggagttggaagacgaactgcaagcgacagaggacgcaaagctgaggctggaagtcaacatgcaggcattaaagggacagttcgagagagacctgcaggcaagagacgagcagaacgaggaaaagaggaggcagctccaaaggcagctgcacgagtacgaaacggaactggaggacgagcgaaagcagagggcgctagcagcagcagcaaagaaaaagctggagggggacctgaaggacctggagttgcaggcagacagcgcaataaaagggagggaagaggcgatcaagcaactaagaaagctgcaggcacaaatgaaggatttccagagagagctagaggatgcaagggcaagccgggacgagatattcgcgacggcaaaagaaaacgagaaaaaggcgaaaagcctagaagcagacctgatgcagctacaggaggatttggcggcggcggagagggcaaggaaacaggcagatctggagaaggaggagctggcggaagagttggcaagtagcctaagcggaaggaatgcgctgcaggacgaaaagcggagactcgaggcgagaatagcacagctagaggaggaactggaggaggagcagggaaacatggaagcgatgagcgacagagtgagaaaggcgacgcaacaggcggaacagctaagcaacgagttagcaacggagagaagtacagcccaaaagaatgaaagtgcaaggcaacagctagagaggcagaacaaggaactgaggagcaagctgcacgagatggaaggagcagtgaaaagcaaattcaaaagcaccatcgcggcgctggaagcgaagatagcgcagctggaggagcaggtagaacaagaggcaagagagaagcaagcggcgacaaagagtctaaagcagaaagacaagaaactgaaagagatactgttacaagtggaggacgaaaggaagatggcagagcaatacaaggagcaggcggaaaaggggaacgcgagggtgaaacagttaaagaggcaactggaggaggcggaggaagagagccaaagaataaacgccaacagaaggaaactacagcgggaattggacgaggcaacagagagtaacgaagccatggggcgagaagtgaacgcactaaagagcaaactgaggcgggggaacgagacgagtttcgtaccgagcaggcggagcggagggagaagggtgatagagaatgcagacggcagcgaagaggaaacggacacgagagacgcagacttcaacgggacgaaggcgagcgaatagggactagtccctgttcccagagcccacttttttttctttttttgaaataaaatagcctgtctttcagatctcaaaggctcttttcagagccaccaaaaaaaaaaaaaaaaaaaaaaaaaaaaaaaaaaaaaaaaaaaaaaaaaaaaaaaaaaaaaaaaaaaaaaaaaaaaaaaaaaaaaaaaaaaaaaaaaaaaa

SEQ ID NO: 880 - RNA, 1823 nt, synthetic construct
  misc_feature 1..1823: note = Artificial____CBFbeta(1-165)_SMMHC(1527-1877) mRNA opt11
  source 1..1823: mol_type = other RNA
aggagagtcccgcagtcggcgtccagcggctctgcttgttcgtgtgtgtgtcgttgcaggccttattcaagcttaccatgccgagggtggtgccagaccaaaggagcaagttcgagaacgaggaatttttcagaaagctgagcagagagtgcgagataaagtacacggggtttagagacagaccacacgaggagaggcaggcaaggttccagaacgcatgcagagacgggagaagcgagatagcattcgtagcgacaggaacaaacctaagcctacaatttttcccggcgagctggcagggagagcagagacagacgccaagcagggagtacgtggacctagagagggaagcaggaaaggtgtacctaaaggcaccaatgatactaaatggggtgtgcgtaatatggaaggggtggatagacctacagagactggacgggatgggatgcttggagttcgacgaagagagagcgcaacaggaggacgcactggcacaacaagcattcgaagaggcaaggaggaggacgagagagttcgaggacagagacaggagtcacagggaggaaatggaggtacacgaactagagaaaagcaagagggcgctggagacacagatggaagagatgaaaacgcaactggaggagctggaagacgagctgcaggcaacagaagatgcgaagctaaggctggaggtgaacatgcaggcactgaaaggacagttcgaaagggacctgcaggcgagggacgaacagaacgaggaaaagaggaggcagctccagaggcagctacacgagtacgagacggagttggaagacgagagaaagcaaagagcactagcggcggcggcgaagaaaaagctagagggagacctcaaagatctggagctacaggcagacagcgcgataaagggcagggaggaagcgataaagcagctaaggaagctgcaggcacagatgaaggacttccagagggagctcgaggacgcaagagcgagccgggacgagatattcgccacggcaaaggagaacgaaaagaaggcgaaaagcctggaggcggacctaatgcaactgcaagaagacctggcagcggcagagcgagcgaggaagcaggcagacctagagaaggaggagctggcggaagaactggcgagtagcctgagcggaaggaacgcactgcaggacgagaagaggaggctagaggcaagaatagcgcagctggaggaggagttggaggaggagcaggggaacatggaggcgatgagcgacagagtgagaaaggcgacacagcaagcagagcagttaagcaacgagctggcaacagagagaagcacggcgcaaaagaacgaatcagcgaggcaacagttggagaggcagaacaaggaactaagaagcaagctgcacgagatggagggcgcggtaaagagcaaattcaagtcaacaatagcggcgcttgaggcaaagatagcacagctggaagaacaagtagaacaggaggcgagagagaaacaagcagcgacaaagagcctgaaacagaaggacaagaagttaaaggagatactgctacaggtagaggacgaaagaaaaatggcggaacagtacaaagagcaggcagaaaaggggaacgcataaggactagtccctgttcccagagcccacttttttttctttttttgaaataaaatagcctgtctttcagatctcaaaggctcttttcagagccaccaaaaaaaaaaaaaaaaaaaaaaaaaaaaaaaaaaaaaaaaaaaaaaaaaaaaaaaaaaaaaaaaaaaaaaaaaaaaaaaaaaaaaaaaaaaaaaaaaaaaa

SEQ ID NO: 881 - RNA, 884 nt, synthetic construct
  misc_feature 1..884: note = Artificial____CBFbeta(1-165)_Linker_Lifeact mRNA opt11
  source 1..884: mol_type = other RNA
aggagagtcccgcagtcggcgtccagcggctctgcttgttcgtgtgtgtgtcgttgcaggccttattcaagcttaccatgccgcgcgtggtcccggaccagcgctcgaaatttgaaaatgaagagttctttcgcaagctctcgcgagagtgcgagataaagtacacgggctttcgcgatagaccgcacgaggaaaggcaagcgcgctttcaaaatgcctgtagagatggcaggagcgagatcgcgttcgtggccacgggcacgaacttgagcctgcaatttttcccggcctcgtggcagggcgagcagaggcaaacgccctcgcgcgagtacgtggacttggaaagggaagcgggcaaggtgtatctaaaggccccgatgatactaaatggagtgtgcgtgatctggaaagggtggatagacctgcaaaggctcgatggaatgggctgtctagagttcgatgaggaacgcgcgcaacaggaagacgcattggcacagcaagcgttcgaggaagcacgcaggagaacgcgcgagttcgaggacagggacaggagccatcgcgaggaaatggaagggggctcgggagggagcgggggctctggcgggagcgggggaggaggcgtggccgatctcatcaaaaagttcgagagcataagcaaagaagagggcgatcccccggtagcgacatagggactagtccctgttcccagagcccacttttttttctttttttgaaataaaatagcctgtctttcagatctcaaaggctcttttcagagccaccaaaaaaaaaaaaaaaaaaaaaaaaaaaaaaaaaaaaaaaaaaaaaaaaaaaaaaaaaaaaaaaaaaaaaaaaaaaaaaaaaaaaaaaaaaaaaaaaaaaaa

SEQ ID NO: 882 - RNA, 851 nt, synthetic construct
  misc_feature 1..851: note = Artificial____CBFbeta(1-165)_HIF1alpha(549-575) mRNA opt11
  source 1..851: mol_type = other RNA
aggagagtcccgcagtcggcgtccagcggctctgcttgttcgtgtgtgtgtcgttgcaggccttattcaagcttaccatgccgcgcgtggtcccggaccagcgctcgaaatttgaaaatgaagagttctttcgaaagctctcgcgcgagtgcgagatcaaatacacgggcttccgcgatcgcccgcacgaggaaaggcaagcgcgctttcaaaatgcctgtcgcgatggcaggagcgagatcgcgttcgtggccacgggcacgaacctgagcctgcaatttttcccggcctcgtggcagggcgagcaaaggcaaacgccctcgcgcgagtacgtggacttggaaagggaagcgggcaaggtctatctcaaggccccgatgatactcaatggcgtgtgcgtgatctggaaagggtggatagacttgcaaaggctcgatggcatgggctgtctcgagttcgacgaggaacgcgcgcaacaggaagatgccctggcccagcaagcgttcgaggaagcgcgcaggcgcacgcgcgagttcgaggacagagacaggagccaccgagaggaaatggaaccgttctcgacccaggacacggacctggacttggaaatgctcgcgccctatatcccgatggatgacgatttccagctcaggtaaggactagtccctgttcccagagcccacttttttttctttttttgaaataaaatagcctgtctttcagatctcaaaggctcttttcagagccaccaaaaaaaaaaaaaaaaaaaaaaaaaaaaaaaaaaaaaaaaaaaaaaaaaaaaaaaaaaaaaaaaaaaaaaaaaaaaaaaaaaaaaaaaaaaaaaaaaaaaa

SEQ ID NO: 883 - RNA, 896 nt, synthetic construct
  misc_feature 1..896: note Artificial____CBFbeta(1-165)_Linker_HIF1alpha(549-575) mRNA opt11
  source 1..896: mol_type = other RNA
aggagagtcccgcagtcggcgtccagcggctctgcttgttcgtgtgtgtgtcgttgcaggccttattcaagcttaccatgccgcgcgtggtcccggaccagcgctcgaaatttgaaaatgaagagttctttcgaaagctatcgcgagagtgcgagatcaagtacacgggattccgcgatcgaccgcacgaggaaagacaagcgcgatttcaaaatgcatgtcgcgatggcaggagcgagatagcgttcgtggccacgggcacaaacttgagcttgcaattcttcccggcatcatggcagggcgagcaaaggcaaacaccctcgcgcgagtacgtggacttggaaagggaagcgggcaaggtctacctaaaggccccgatgatactcaatggagtgtgcgtgatctggaaagggtggatagacttacaaaggctcgatggcatgggatgtctcgagttcgatgaggaacgcgcgcaacaggaagatgccttggcacagcaagcgttcgaggaagcgcgcaggcgaacgcgcgagttcgaagacagagacaggagccatcgagaggaaatggaaggaggatcgggcggaagcgggggctcgggcgggagcgggggcggaccatttagcacgcaagataccgatctagatctcgagatgttggccccgtacatacccatggacgatgactttcaattgcgctagggactagtccctgttcccagagcccacttttttttctttttttgaaataaaatagcctgtctttcagatctcaaaggctcttttcagagccaccaaaaaaaaaaaaaaaaaaaaaaaaaaaaaaaaaaaaaaaaaaaaaaaaaaaaaaaaaaaaaaaaaaaaaaaaaaaaaaaaaaaaaaaaaaaaaaaaaaaaa

SEQ ID NO: 884 - RNA, 2531 nt, synthetic construct
  misc_feature 1..2531: note = Artificial____RUNX1(1-177)_N_RUNX1T1a(31-604) mRNA opt11
  source 1..2531: mol_type = other RNA
aggagagtcccgcagtcggcgtccagcggctctgcttgttcgtgtgtgtgtcgttgcaggccttattcaagcttaccatgcgcataccagtagatgcctccacctctcgccgcttcacacctccctcgacagccctcagccccggaaaaatgtccgaagcgctcccacttggcgcacccgacgcaggcgctgccctcgccggaaaactccgtagtggtgaccgctctatggtggaagtcttagccgaccaccccggagaactcgtaagaacagactccccaaacttcctctgctccgtgctacctacacactggcgctgcaacaaaaccctcccgattgccttcaaagtcgtagccctaggcgacgtccccgacggaaccctcgtcaccgtcatggcaggcaatgatgaaaactactccgcagaactccgcaacgccaccgctgcaatgaaaaaccaagtcgcacgattcaatgacctcagattcgtagggcgctccggccgagggaaatcattcaccctcacaatcacagtcttcaccaaccctccacaagtcgcaacataccaccgcgccatcaaaatcacagtcgacggaccccgagaaccccgcaatagaactgagaaacacagcaccatgcccgattcgccagtcgatgtcaaaacccaatcaaggctcaccccgcccacaatgcccccacccccaaccacacagggcgcaccccgcacctcttcattcacccctacaacactaacaaatggcacatcccacagtccaaccgcccttaatggcgccccatccccaccaaacggtttctccaacggcccctcctcttcatcatcatcctccctggctaaccaacaactcccacccgcatgcggagcacgacaactcagcaaactaaaacgattcctcaccactcttcaacaattcggcaacgacatatccccagaaataggcgaacgagtccgaaccctagtcctcggtctagtcaattccacgctcactatagaggagttccactccaaactacaagaagctaccaacttcccactccgaccattcgtcattccattcctcaaggcaaacctccctctgctccaacgtgaactcctacactgcgccagactcgccaagcaaaaccccgcacaatatcttgcccaacacgaacaacttctcttagacgcctccaccacatctcccgtcgactcatctgaacttctcctagatgttaacgaaaacggcaaacgcagaactcccgaccgcaccaaagaaaacgggttcgatagagaaccactacacagcgaacacccctctaaacgcccatgcaccatatctcctggccaacggtactcacctaacaacggtctctcataccaacccaatggcctcccacaccccaccccaccacccccacaacactaccgacttgacgacatggcgatcgcacaccactacagagactcttataggcacccatcccaccgcgatctccgcgaccgcaatcgccccatgggactacacggcactcgccaagaagaaatgatcgaccaccgactaaccgaccgtgaatgggcagaagaatggaaacacctcgaccacctcctaaattgcatcatggacatggtcgagaaaacaaggcgctcactcacggttctccgtcgctgccaagaagcagatcgtgaagaactgaactattggattcgacgatactcagacgccgaagacctcaagaaaggcggaggctcatctagctcccatagtcgccaacaatcacccgtaaacccggacccagtagccctcgacgctcaccgagagttcctacaccgtcccgcctccggatacgtacccgaagaaatatggaagaaagctgaagaagcagtaaacgaagtcaaacgccaagctatgaccgaactacaaaaagccgtaagcgaagctgaacgcaaagcacacgacatgatcactaccgaacgcgcaaaaatggaacgaaccgtcgcagaagccaaacgccaggccgccgaagacgcccttgctgtcataaatcagcaagaagactcctccgaatcctgctggaactgtggccgcaaagccagcgaaacctgctccggttgcaataccgcccgctactgcggttcattctgccagcacaaagactgggaaaaacaccaccacatctgcggtcaaaccctgcaagctcaacaacaaggcgacacccctgccgtctcatccagcgtaacccccaacagcggcgccggctccccaatggacaccccacccgcagccacaccccgatcaacaacacccggaacaccctcgactatcgaaaccacaccccgttagggactagtccctgttcccagagcccacttttttttctttttttgaaataaaatagcctgtctttcagatctcaaaggctcttttcagagccaccaaaaaaaaaaaaaaaaaaaaaaaaaaaaaaaaaaaaaaaaaaaaaaaaaaaaaaaaaaaaaaaaaaaaaaaaaaaaaaaaaaaaaaaaaaaaaaaaaaaaa

SEQ ID NO: 885 - RNA, 1046 nt, synthetic construct
  misc_feature 1..1046: note = Artificial____RUNX1(1-241)_RUNX1T1b(short) mRNA opt11
  source 1..1046: mol_type = other RNA
aggagagtcccgcagtcggcgtccagcggctctgcttgttcgtgtgtgtgtcgttgcaggccttattcaagcttaccatgcgcatcccagtcgacgcctccacctcccgccgcttcaccccaccctcaacagcactctcacccggcaaaatgtcagaagcactccctctcggagcacccgacgccggcgccgccctcgccggcaaactccgctcaggcgaccgatcaatggtcgaagtcctagccgaccaccccggagaactcgtccgcaccgactcacccaacttcctctgctccgtcctacccacccactggcgctgcaacaaaaccctccccatcgccttcaaagtcgtcgcactaggcgacgtcccagacggcaccctcgtcaccgtcatggccggcaacgacgaaaactactccgccgaactccgcaacgccacagcagccatgaaaaaccaagtcgcccgcttcaacgacctccgcttcgtaggccgctccggccgcggcaaatccttcaccctaaccatcacagtattcaccaatccaccccaagtcgccacctaccaccgcgctatcaaaatcaccgtcgacggcccccgcgaaccccgccgccaccgacaaaaactcgacgaccaaaccaaacccggctcactctccttctccgaacgcctctccgaactcgaacaactccgccgaacagccatgcgcgtctcaccccaccaccccgcccccacccccaacccccgagcctccctcaaccactcaaccgccttcaacccccaaccacaatcccaaatgcaagaagtcggcttctgccacgtagcccaagtcggtctcaaactcctcggctaaggactagtccctgttcccagagcccacttttttttctttttttgaaataaaatagcctgtctttcagatctcaaaggctcttttcagagccaccaaaaaaaaaaaaaaaaaaaaaaaaaaaaaaaaaaaaaaaaaaaaaaaaaaaaaaaaaaaaaaaaaaaaaaaaaaaaaaaaaaaaaaaaaaaaaaaaaaaaa

SEQ ID NO: 886 - RNA, 2750 nt, synthetic construct
  misc_feature 1..2750: note = Artificial____RUNX1(1-241)_V_RUNX1T1b(22-604) mRNA opt11
  source 1..2750: mol_type = other RNA
aggagagtcccgcagtcggcgtccagcggctctgcttgttcgtgtgtgtgtcgttgcaggccttattcaagcttaccatgcgcatccccgtggacgcctcaacaagccgacgcttcacgcccccatccaccgccctatcccccggcaaaatgtcagaagccctccccctcggagccccagacgcaggggccgcactcgcaggcaaacttcgatccggggacaggagcatggtcgaagtcctagccgaccaccccggagagctagtccgaaccgactcccccaacttcctgtgctccgtactgccaacccactggcgatgtaacaaaacactccctatagcttttaaagtagtggccctaggagacgttccagacggcaccctcgtcaccgtcatggccggcaacgacgaaaactacagcgccgaactacgcaacgcaactgccgccatgaaaaatcaagtggccagattcaacgacctccgcttcgtcggccgcagcggaagaggaaaatcgttcaccttaaccatcacagttttcacaaacccaccccaggttgcaacatatcaccgagccatcaaaatcactgttgacggcccacgtgaaccaagacggcatcgtcaaaaactagacgaccaaacaaaaccaggttcactctcattttcagaacgcctctcagaactcgaacaactacgacgaaccgctatgcgcgtctcaccccaccaccccgccccgaccccgaacccacgagcatctctgaaccacagcacagccttcaacccacaaccacagtcccaaatgcaagttggacccgagaaacgagtcccagctatgccgggcagccccgtcgaggtcaaaatccaatcgcgcagcagccctcccacaatgcccccactaccacccatcaacccaggcggtccccgccccgtctcattcaccccaacagccctctcaaatggaatcaaccacagccctcccaccctcaacggtgccccctccccaccacaacgcttttcaaacggaccagcgtcctccacctccagcgctctcactaaccaacaactcccagcaacttgcggagccagacaactcagcaaactaaaaagattcctcaccaccctacaacagttcggaaacgacatctcccccgaaataggcgagaaagttcgcactcttgtactagcccttgtaaactccacagtaactatcgaagagttccactgcaaactacaagaagcaaccaacttcccactccgccccttcgtgatcccattcctaaaagcaaacctaccactactccaacgcgaactgctccactgcgcccgtgccgcaaaacagactccctcacaatacctcgcccaacatgaacatcttctcctcaacacatcaattgctagcccagcagactcatccgaacttctcatggaagtccacggaaacggtaaacgaccatctcccgaacgacgcgaagaaaactccttcgaccgcgacaccatcgcccccgaaccacccgccaaacgcgtatgcacaatatcaccggccccgcgccactcccctgcacttaccgtaccccttatgaacccagggggccaattccaccctacacccccacccctgcagcactacactctagaagacattgcaacaagccacctataccgagaacctaacaaaatgctagaacacagagaagtgcgtgaccgccaccacagcctcggcttaaacgggggctaccaagacgaactcgttgatcaccgcctcaccgaacgagagtgggcagatgaatggaaacacctggaccacgccctaaactgcatcatggaaatggtcgagaaaaccagacgatcaatggccgtcctaagaaggtgccaagaatcagacagagaagaactcaactattggaaacgacgatataacgaaaacaccgaactcagaaaaacaggcactgaactcgtctcgagacaacactcaccaggctctgcagactctctttccaacgactcacaacgcgagttcaatagccgaccaggcaccggctacgtccccgtcgaattttggaagaaaaccgaagaagccgtaaacaaagtcaaaatacaagcaatgtccgaagtccaaaaagccgtcgccgaagcagaacaaaaagccttcgaggttatcgcgaccgaacgcgcccgtatggaacagacaatagccgacgtcaaacgacaggctgccgaagacgctttcctcgttatcaacgaacaagaagaatcaactgaaaactgctggaactgcggccggaaagcgtccgaaacctgctcaggctgcaacatcgctcgttattgcggctccttttgccaacataaagactgggagcgccaccaccgcctatgcggccaaaacctacacggccaaagcccccacggacaaggccgacctctcctacccgtaggccgaggctcctccgcacgctccgccgactgcagcgtccccagccccgcactcgacaaaacttcggcaaccacatcccgcagcagcacccccgcgagcgttacagccatcgacacaaacggactataaggactagtccctgttcccagagcccacttttttttctttttttgaaataaaatagcctgtctttcagatctcaaaggctcttttcagagccaccaaaaaaaaaaaaaaaaaaaaaaaaaaaaaaaaaaaaaaaaaaaaaaaaaaaaaaaaaaaaaaaaaaaaaaaaaaaaaaaaaaaaaaaaaaaaaaaaaaaaa

SEQ ID NO: 887 - RNA, 2750 nt, synthetic construct
  misc_feature 1..2750: note = Artificial____RUNX1(1-241)_I_RUNX1T1b(22-604) mRNA opt11
  source 1..2750: mol_type = other RNA
aggagagtcccgcagtcggcgtccagcggctctgcttgttcgtgtgtgtgtcgttgcaggccttattcaagcttaccatgaggatacccgtcgacgcctccacgtcacgccgcttcacacccccaagcaccgccctatcacccggcaaaatgtccgaagctctaccactaggtgcgccagacgcaggcgctgctctcgccggaaaactacgatccggggaccgatccatggtcgaagtcctcgctgatcaccccggcgaacttgtccgcacagactccccaaacttcctctgctccgtactcccgactcactggcgttgcaacaaaacacttcctattgcgttcaaggtcgtagccctaggggacgtccccgacggcaccttagtcacagtcatggcgggtaacgacgagaactactcagccgaattacgcaacgctacagcagccatgaaaaaccaggtagctcgcttcaacgacctccggttcgtcggtagaagcggccgaggaaaatcttttaccctcacaatcaccgtgttcaccaacccaccccaagtcgccacctaccaccgggcaatcaaaatcacagttgacggaccccgcgagccccgacgccatcgccaaaaacttgacgaccaaaccaaaccaggatcactatccttctcagagcgactctcagaactcgaacaattacgccggaccgcaatgcgtgtctcaccccaccacccggcccccacgcccaacccccgcgcctcactcaaccactccactgctttcaacccgcaaccccaatcccaaatgcagatcggcccagaaaaacgcgttcccgccatgccaggaagtcccgtcgaagtcaaaatccaatccagatcttccccaccaaccatgcctcccctcccgcccataaacccgggaggtccccgacccgtgtccttcacccccaccgccctctcgaacggcatcaaccactcaccacctaccctaaacggagcaccatccccaccccaacgcttctcaaacggacctgcatcctccacatcgtccgccctcaccaaccaacaactcccagccacatgcggcgcccgtcaactatctaagctaaaacgcttcctaaccactctccagcaatttggcaacgacatatcccccgaaatcggcgaaaaagtccgcacactcgtcttagccctcgtcaattccaccgtcaccatagaagagttccactgcaaactccaagaagccacaaacttcccactccgtccctttgtcatcccattcttaaaggcgaacctaccactactccaaagagaactactccactgcgctcgggccgcaaaacaaacccctagccagtacctagcccaacacgaacatctactactcaacactagcatcgcctcacccgcagactcatctgaactacttatggaagtccacggcaacggcaaacgcccctccccagaaaggcgcgaagaaaactccttcgatcgagacacaatagcacccgaaccacccgccaaacgcgtatgcaccatcagcccagcaccccgacactccccagccctcacggtccctctaatgaacccgggcggacaattccaccccaccccaccacccctacaacactacacattagaagacatagccacatctcacctctaccgcgaacccaataaaatgctggaacaccgcgaagtccgagatagacaccattctctaggactaaatggaggctaccaagacgaacttgtcgaccacagactcacagaacgcgaatgggccgacgaatggaagcacctcgatcatgcccttaactgtatcatggagatggtagagaaaacaagacgatccatggcagttctacgtcgatgccaagagagcgaccgcgaagaactcaactactggaaacgccgctacaacgaaaacacagaactacgaaaaaccggcaccgaactcgtctcccgtcagcactccccgggaagcgccgactcccttagcaacgactcacaacgcgagttcaactctcgccccggaacaggctacgttcctgtcgagttctggaagaaaactgaagaagccgtaaacaaagtcaaaatccaagccatgtcagaagtccaaaaagccgtagcagaagccgaacaaaaggctttcgaagtaattgcaaccgaacgcgcacgtatggaacaaaccatagcagatgtaaaaagacaagccgccgaagacgccttcctcgtcataaacgaacaagaagaatccaccgaaaactgttggaactgcggccgtaaagcctccgaaacatgttctggctgcaacattgcccgttactgtgggtccttctgccaacacaaagattgggaacgccaccaccgcctctgcggacaaaacctccacggccaaagcccccatggtcaaggtagaccactactacccgttggacgcggctccagcgcacgatcagccgactgctcagtgccatcccccgcccttgacaaaacctccgccacaacctcgcgatcatccacaccagcctcagtaacagccatagacaccaacgggctttgaggactagtccctgttcccagagcccacttttttttctttttttgaaataaaatagcctgtctttcagatctcaaaggctcttttcagagccaccaaaaaaaaaaaaaaaaaaaaaaaaaaaaaaaaaaaaaaaaaaaaaaaaaaaaaaaaaaaaaaaaaaaaaaaaaaaaaaaaaaaaaaaaaaaaaaaaaaaaa

SEQ ID NO: 888 - RNA, 1640 nt, synthetic construct
  misc_feature 1..1640: note = Homo sapiens__Q01196-1__RUNX1(K83E_R174Q) mRNA wt
  source 1..1640: mol_type = other RNA
aggagagtcccgcagtcggcgtccagcggctctgcttgttcgtgtgtgtgtcgttgcaggccttattcaagcttaccatgcgtatccccgtagatgccagcacgagccgccgcttcacgccgccttccaccgcgctgagcccaggcaagatgagcgaggcgttgccgctgggcgccccggacgccggcgctgccctggccggcaagctgaggagcggcgaccgcagcatggtggaggtgctggccgaccacccgggcgagctggtgcgcaccgacagccccaacttcctctgctccgtgctgcctacgcactggcgctgcaacgagaccctgcccatcgctttcaaggtggtggccctaggggatgttccagatggcactctggtcactgtgatggctggcaatgatgaaaactactcggctgagctgagaaatgctaccgcagccatgaagaaccaggttgcaagatttaatgacctcaggtttgtcggtcgaagtggaagagggaaaagcttcactctgaccatcactgtcttcacaaacccaccgcaagtcgccacctaccacagagccatcaaaatcacagtggatgggccccaggaacctcgaagacatcggcagaaactagatgatcagaccaagcccgggagcttgtccttttccgagcggctcagtgaactggagcagctgcggcgcacagccatgagggtcagcccacaccacccagcccccacgcccaaccctcgtgcctccctgaaccactccactgcctttaaccctcagcctcagagtcagatgcaggatacaaggcagatccaaccatccccaccgtggtcctacgatcagtcctaccaatacctgggatccattgcctctccttctgtgcacccagcaacgcccatttcacctggacgtgccagcggcatgacaaccctctctgcagaactttccagtcgactctcaacggcacccgacctgacagcgttcagcgacccgcgccagttccccgcgctgccctccatctccgacccccgcatgcactatccaggcgccttcacctactccccgacgccggtcacctcgggcatcggcatcggcatgtcggccatgggctcggccacgcgctaccacacctacctgccgccgccctaccccggctcgtcgcaagcgcagggaggcccgttccaagccagctcgccctcctaccacctgtactacggcgcctcggccggctcctaccagttctccatggtgggcggcgagcgctcgccgccgcgcatcctgccgccctgcaccaacgcctccaccggctccgcgctgctcaaccccagcctcccgaaccagagcgacgtggtggaggccgagggcagccacagcaactcccccaccaacatggcgccctccgcgcgcctggaggaggccgtgtggaggccctactgatgatgaggactagtccctgttcccagagcccacttttttttctttttttgaaataaaatagcctgtctttcagatctcaaaggctcttttcagagccaccaaaaaaaaaaaaaaaaaaaaaaaaaaaaaaaaaaaaaaaaaaaaaaaaaaaaaaaaaaaaaaaaaaaaaaaaaaaaaaaaaaaaaaaaaaaaaaaaaaaaa

SEQ ID NO: 889 - RNA, 2114 nt, synthetic construct
  misc_feature 1..2114: note = Homo sapiens____CBFbeta(1-165)_SMMHC(1527-1972) mRNA wt
  source 1..2114: mol_type = other RNA
aggagagtcccgcagtcggcgtccagcggctctgcttgttcgtgtgtgtgtcgttgcaggccttattcaagcttaccatgccgcgcgtcgtgcccgaccagagaagcaagttcgagaacgaggagttttttaggaagctgagccgcgagtgtgagattaagtacacgggcttcagggaccggccccacgaggaacgccaggcacgcttccagaacgcctgccgcgacggccgctcggaaatcgcttttgtggccacaggaaccaatctgtctctccagttttttccggccagctggcagggagaacagcgacaaacacctagccgagagtatgtcgacttagaaagagaagcaggcaaggtatatttgaaggctcccatgattctgaatggagtctgtgttatctggaaaggctggattgatctccaaagactggatggtatgggctgtctggagtttgatgaggagcgagcccagcaggaggatgcattagcacaacaggcctttgaagaggctcggagaaggacacgcgaatttgaagatagagacaggtctcatcgggaggaaatggaggtccatgagctggagaagtccaagcgggccctggagacccagatggaggagatgaagacgcagctggaagagctggaggacgagctgcaagccacggaggacgccaaactgcggctggaagtcaacatgcaggcgctcaagggccagttcgaaagggatctccaagcccgggacgagcagaatgaggagaagaggaggcaactgcagagacagcttcacgagtatgagacggaactggaagacgagcgaaagcaacgtgccctggcagctgcagcaaagaagaagctggaaggggacctgaaagacctggagcttcaggccgactctgccatcaaggggagggaggaagccatcaagcagctacgcaaactgcaggctcagatgaaggactttcaaagagagctggaagatgcccgtgcctccagagatgagatctttgccacagccaaagagaatgagaagaaagccaagagcttggaagcagacctcatgcagctacaagaggacctcgccgccgctgagagggctcgcaaacaagcggacctcgagaaggaggaactggcagaggagctggccagtagcctgtcgggaaggaacgcactccaggacgagaagcgccgcctggaggcccggatcgcccagctggaggaggagctggaggaggagcagggcaacatggaggccatgagcgaccgggtccgcaaagccacacagcaggccgagcagctcagcaacgagctggccacagagcgcagcacggcccagaagaatgagagtgcccggcagcagctcgagcggcagaacaaggagctccggagcaagctccacgagatggagggggccgtcaagtccaagttcaagtccaccatcgcggcgctggaggccaagattgcacagctggaggagcaggtcgagcaggaggccagagagaaacaggcggccaccaagtcgctgaagcagaaagacaagaagctgaaggaaatcttgctgcaggtggaggacgagcgcaagatggccgagcagtacaaggagcaggcagagaaaggcaatgccagggtcaagcagctcaagaggcagctggaggaggcagaggaggagtcccagcgcatcaacgccaaccgcaggaagctgcagcgggagctggatgaggccacggagagcaacgaggccatgggccgcgaggtgaacgcactcaagagcaagctcaggcgaggaaacgagacctctttcgttccttctagaaggtctggaggacgtagagttattgaaaatgcagatggttctgaggaggaaacggacactcgagacgcagacttcaatggaaccaaggccagtgaatgatgatgaggactagtccctgttcccagagcccacttttttttctttttttgaaataaaatagcctgtctttcagatctcaaaggctcttttcagagccaccaaaaaaaaaaaaaaaaaaaaaaaaaaaaaaaaaaaaaaaaaaaaaaaaaaaaaaaaaaaaaaaaaaaaaaaaaaaaaaaaaaaaaaaaaaaaaaaaaaaaa

SEQ ID NO: 890 - RNA, 1829 nt, synthetic construct
  misc_feature 1..1829: note = Artificial____CBFbeta(1-165)_SMMHC(1527-1877) mRNA wt
  source 1..1829: mol_type = other RNA
aggagagtcccgcagtcggcgtccagcggctctgcttgttcgtgtgtgtgtcgttgcaggccttattcaagcttaccatgccgcgcgtcgtgcccgaccagagaagcaagttcgagaacgaggagttttttaggaagctgagccgcgagtgtgagattaagtacacgggcttcagggaccggccccacgaggaacgccaggcacgcttccagaacgcctgccgcgacggccgctcggaaatcgcttttgtggccacaggaaccaatctgtctctccagttttttccggccagctggcagggagaacagcgacaaacacctagccgagagtatgtcgacttagaaagagaagcaggcaaggtatatttgaaggctcccatgattctgaatggagtctgtgttatctggaaaggctggattgatctccaaagactggatggtatgggctgtctggagtttgatgaggagcgagcccagcaggaggatgcattagcacaacaggcctttgaagaggctcggagaaggacacgcgaatttgaagatagagacaggtctcatcgggaggaaatggaggtccatgagctggagaagtccaagcgggccctggagacccagatggaggagatgaagacgcagctggaagagctggaggacgagctgcaagccacggaggacgccaaactgcggctggaagtcaacatgcaggcgctcaagggccagttcgaaagggatctccaagcccgggacgagcagaatgaggagaagaggaggcaactgcagagacagcttcacgagtatgagacggaactggaagacgagcgaaagcaacgtgccctggcagctgcagcaaagaagaagctggaaggggacctgaaagacctggagcttcaggccgactctgccatcaaggggagggaggaagccatcaagcagctacgcaaactgcaggctcagatgaaggactttcaaagagagctggaagatgcccgtgcctccagagatgagatctttgccacagccaaagagaatgagaagaaagccaagagcttggaagcagacctcatgcagctacaagaggacctcgccgccgctgagagggctcgcaaacaagcggacctcgagaaggaggaactggcagaggagctggccagtagcctgtcgggaaggaacgcactccaggacgagaagcgccgcctggaggcccggatcgcccagctggaggaggagctggaggaggagcagggcaacatggaggccatgagcgaccgggtccgcaaagccacacagcaggccgagcagctcagcaacgagctggccacagagcgcagcacggcccagaagaatgagagtgcccggcagcagctcgagcggcagaacaaggagctccggagcaagctccacgagatggagggggccgtcaagtccaagttcaagtccaccatcgcggcgctggaggccaagattgcacagctggaggagcaggtcgagcaggaggccagagagaaacaggcggccaccaagtcgctgaagcagaaagacaagaagctgaaggaaatcttgctgcaggtggaggacgagcgcaagatggccgagcagtacaaggagcaggcagagaaaggcaatgcctgatgatgaggactagtccctgttcccagagcccacttttttttctttttttgaaataaaatagcctgtctttcagatctcaaaggctcttttcagagccaccaaaaaaaaaaaaaaaaaaaaaaaaaaaaaaaaaaaaaaaaaaaaaaaaaaaaaaaaaaaaaaaaaaaaaaaaaaaaaaaaaaaaaaaaaaaaaaaaaaaaa

SEQ ID NO: 891 - RNA, 890 nt, synthetic construct
  misc_feature 1..890: note = Artificial____CBFbeta(1-165)_Linker_Lifeact mRNA wt
  source 1..890: mol_type = other RNA
aggagagtcccgcagtcggcgtccagcggctctgcttgttcgtgtgtgtgtcgttgcaggccttattcaagcttaccatgccgcgcgtcgtgcccgaccagagaagcaagttcgagaacgaggagttttttaggaagctgagccgcgagtgtgagattaagtacacgggcttcagggaccggccccacgaggaacgccaggcacgcttccagaacgcctgccgcgacggccgctcggaaatcgcttttgtggccacaggaaccaatctgtctctccagttttttccggccagctggcagggagaacagcgacaaacacctagccgagagtatgtcgacttagaaagagaagcaggcaaggtatatttgaaggctcccatgattctgaatggagtctgtgttatctggaaaggctggattgatctccaaagactggatggtatgggctgtctggagtttgatgaggagcgagcccagcaggaggatgcattagcacaacaggcctttgaagaggctcggagaaggacacgcgaatttgaagatagagacaggtctcatcgggaggaaatggagggcgggagcggcgggtccggcgggagcggcggctccgggggcgggggcgtggccgacctgatcaagaagttcgagagcatcagcaaggaggagggggatccaccggtcgccacctgatgatgaggactagtccctgttcccagagcccacttttttttctttttttgaaataaaatagcctgtctttcagatctcaaaggctcttttcagagccaccaaaaaaaaaaaaaaaaaaaaaaaaaaaaaaaaaaaaaaaaaaaaaaaaaaaaaaaaaaaaaaaaaaaaaaaaaaaaaaaaaaaaaaaaaaaaaaaaaaaaa

SEQ ID NO: 892 - RNA, 857 nt, synthetic construct
  misc_feature 1..857: note = Artificial____CBFbeta(1-165)_HIF1alpha(549-575) mRNA wt
  source 1..857: mol_type = other RNA
aggagagtcccgcagtcggcgtccagcggctctgcttgttcgtgtgtgtgtcgttgcaggccttattcaagcttaccatgccgcgcgtcgtgcccgaccagagaagcaagttcgagaacgaggagttttttaggaagctgagccgcgagtgtgagattaagtacacgggcttcagggaccggccccacgaggaacgccaggcacgcttccagaacgcctgccgcgacggccgctcggaaatcgcttttgtggccacaggaaccaatctgtctctccagttttttccggccagctggcagggagaacagcgacaaacacctagccgagagtatgtcgacttagaaagagaagcaggcaaggtatatttgaaggctcccatgattctgaatggagtctgtgttatctggaaaggctggattgatctccaaagactggatggtatgggctgtctggagtttgatgaggagcgagcccagcaggaggatgcattagcacaacaggcctttgaagaggctcggagaaggacacgcgaatttgaagatagagacaggtctcatcgggaggaaatggagccattttctactcaggacacagatttagacttggagatgttagctccctatatcccaatggatgatgacttccagttacgttgatgatgaggactagtccctgttcccagagcccacttttttttctttttttgaaataaaatagcctgtctttcagatctcaaaggctcttttcagagccaccaaaaaaaaaaaaaaaaaaaaaaaaaaaaaaaaaaaaaaaaaaaaaaaaaaaaaaaaaaaaaaaaaaaaaaaaaaaaaaaaaaaaaaaaaaaaaaaaaaaaa

SEQ ID NO: 893 - RNA, 902 nt, synthetic construct
  misc_feature 1..902: note Artificial____CBFbeta(1-165)_Linker_HIF1alpha(549-575) mRNA wt
  source 1..902: mol_type = other RNA
aggagagtcccgcagtcggcgtccagcggctctgcttgttcgtgtgtgtgtcgttgcaggccttattcaagcttaccatgccgcgcgtcgtgcccgaccagagaagcaagttcgagaacgaggagttttttaggaagctgagccgcgagtgtgagattaagtacacgggcttcagggaccggccccacgaggaacgccaggcacgcttccagaacgcctgccgcgacggccgctcggaaatcgcttttgtggccacaggaaccaatctgtctctccagttttttccggccagctggcagggagaacagcgacaaacacctagccgagagtatgtcgacttagaaagagaagcaggcaaggtatatttgaaggctcccatgattctgaatggagtctgtgttatctggaaaggctggattgatctccaaagactggatggtatgggctgtctggagtttgatgaggagcgagcccagcaggaggatgcattagcacaacaggcctttgaagaggctcggagaaggacacgcgaatttgaagatagagacaggtctcatcgggaggaaatggagggcgggagcggcgggtccggcgggagcggcggctccgggggcgggccattttctactcaggacacagatttagacttggagatgttagctccctatatcccaatggatgatgacttccagttacgttgatgatgaggactagtccctgttcccagagcccacttttttttctttttttgaaataaaatagcctgtctttcagatctcaaaggctcttttcagagccaccaaaaaaaaaaaaaaaaaaaaaaaaaaaaaaaaaaaaaaaaaaaaaaaaaaaaaaaaaaaaaaaaaaaaaaaaaaaaaaaaaaaaaaaaaaaaaaaaaaaaa

SEQ ID NO: 894 - RNA, 2537 nt, synthetic construct
  misc_feature 1..2537: note = Artificial____RUNX1(1-177)_N_RUNX1T1a(31-604) mRNA wt
  source 1..2537: mol_type = other RNA
aggagagtcccgcagtcggcgtccagcggctctgcttgttcgtgtgtgtgtcgttgcaggccttattcaagcttaccatgcgtatccccgtagatgccagcacgagccgccgcttcacgccgccttccaccgcgctgagcccaggcaagatgagcgaggcgttgccgctgggcgccccggacgccggcgctgccctggccggcaagctgaggagcggcgaccgcagcatggtggaggtgctggccgaccacccgggcgagctggtgcgcaccgacagccccaacttcctctgctccgtgctgcctacgcactggcgctgcaacaagaccctgcccatcgctttcaaggtggtggccctaggggatgttccagatggcactctggtcactgtgatggctggcaatgatgaaaactactcggctgagctgagaaatgctaccgcagccatgaagaaccaggttgcaagatttaatgacctcaggtttgtcggtcgaagtggaagagggaaaagcttcactctgaccatcactgtcttcacaaacccaccgcaagtcgccacctaccacagagccatcaaaatcacagtggatgggccccgagaacctcgaaaccgtactgagaagcactccacaatgccagactcacctgtggatgtgaagacgcaatctaggctgactcctccaacaatgccacctcccccaactactcaaggagctccaagaaccagttcatttacaccgacaacgttaactaatggcacgagccattctcctacagccttgaatggcgccccctcaccacccaatggcttcagcaatgggccttcctcttcttcctcctcctctctggctaatcaacagctgcccccagcctgtggtgccaggcaactcagcaagctgaaaaggttccttactaccctgcagcagtttggcaatgacatttcacccgagataggagaaagagttcgcaccctcgttctgggactagtgaactccactttgacaattgaagaatttcattccaaactgcaagaagctactaacttcccactgagaccttttgtcatcccatttttgaaggccaacttgcccctgctgcagcgtgagctcctccactgcgcaagactggccaaacagaaccctgcccagtacctcgcccagcatgaacagctgcttctggatgccagcaccacctcacctgttgactcctcagagctgcttctcgatgtgaacgaaaacgggaagaggcgaactccagacagaaccaaagaaaatggctttgacagagagcctttgcactcagaacatccaagcaagcgaccatgcactattagcccaggccagcggtacagtccaaataacggcttatcctaccagcccaatggcctgcctcaccctaccccacctccacctcagcattaccgtttggatgatatggccattgcccaccactacagggactcctatcgacaccccagccacagggacctcagggacagaaacagacctatggggttgcatggcacacgtcaagaagaaatgattgatcacagactaacagacagagaatgggcagaagagtggaaacatcttgaccatctgttaaactgcataatggacatggtagaaaaaacaaggcgatctctcaccgtactaaggcggtgtcaagaagcagaccgggaagaattgaattactggatccggcggtacagtgacgccgaggacttaaaaaaaggtggcggcagtagcagcagccactctaggcagcagagtcccgtcaacccagacccagttgcactagacgcgcatcgggaattccttcacaggcctgcgtctggatacgtgccagaggagatctggaagaaagctgaggaggccgtcaatgaggtgaagcgccaggcgatgacggagctgcagaaggccgtgtctgaggcggagcggaaagcccacgacatgatcacaacagagagggccaagatggagcgcacggtcgccgaggccaaacggcaggcggcggaggacgcactggcagttatcaatcagcaggaggattcaagcgagagttgctggaattgtggccgtaaagcgagtgaaacctgcagtggctgtaacacagcccgatactgtggctcattttgccagcacaaagactgggagaagcaccatcacatctgtggacagaccctgcaggcccagcagcagggagacacacctgcagtcagctcctctgtcacgcccaacagcggggctgggagcccgatggacacaccaccagcagccactccgaggtcaaccaccccgggaaccccttccaccatagagacaacccctcgctgatgatgaggactagtccctgttcccagagcccacttttttttctttttttgaaataaaatagcctgtctttcagatctcaaaggctcttttcagagccaccaaaaaaaaaaaaaaaaaaaaaaaaaaaaaaaaaaaaaaaaaaaaaaaaaaaaaaaaaaaaaaaaaaaaaaaaaaaaaaaaaaaaaaaaaaaaaaaaaaaaa

SEQ ID NO: 895 - RNA, 1052 nt, synthetic construct
  misc_feature 1..1052: note = Artificial____RUNX1(1-241)_RUNX1T1b(short) mRNA wt
  source 1..1052: mol_type = other RNA
aggagagtcccgcagtcggcgtccagcggctctgcttgttcgtgtgtgtgtcgttgcaggccttattcaagcttaccatgcgtatccccgtagatgccagcacgagccgccgcttcacgccgccttccaccgcgctgagcccaggcaagatgagcgaggcgttgccgctgggcgccccggacgccggcgctgccctggccggcaagctgaggagcggcgaccgcagcatggtggaggtgctggccgaccacccgggcgagctggtgcgcaccgacagccccaacttcctctgctccgtgctgcctacgcactggcgctgcaacaagaccctgcccatcgctttcaaggtggtggccctaggggatgttccagatggcactctggtcactgtgatggctggcaatgatgaaaactactcggctgagctgagaaatgctaccgcagccatgaagaaccaggttgcaagatttaatgacctcaggtttgtcggtcgaagtggaagagggaaaagcttcactctgaccatcactgtcttcacaaacccaccgcaagtcgccacctaccacagagccatcaaaatcacagtggatgggccccgagaacctcgaagacatcggcagaaactagatgatcagaccaagcccgggagcttgtccttttccgagcggctcagtgaactggagcagctgcggcgcacagccatgagggtcagcccacaccacccagcccccacgcccaaccctcgtgcctccctgaaccactccactgcctttaaccctcagcctcagagtcagatgcaggaggtgggcttctgccacgtcgcccaggtggggctgaagctcctgggctgatgatgaggactagtccctgttcccagagcccacttttttttctttttttgaaataaaatagcctgtctttcagatctcaaaggctcttttcagagccaccaaaaaaaaaaaaaaaaaaaaaaaaaaaaaaaaaaaaaaaaaaaaaaaaaaaaaaaaaaaaaaaaaaaaaaaaaaaaaaaaaaaaaaaaaaaaaaaaaaaaa

SEQ ID NO: 896 - RNA, 2756 nt, synthetic construct
  misc_feature 1..2756: note = Artificial____RUNX1(1-241)_V_RUNX1T1b(22-604) mRNA wt
  source 1..2756: mol_type = other RNA
aggagagtcccgcagtcggcgtccagcggctctgcttgttcgtgtgtgtgtcgttgcaggccttattcaagcttaccatgcgtatccccgtagatgccagcacgagccgccgcttcacgccgccttccaccgcgctgagcccaggcaagatgagcgaggcgttgccgctgggcgccccggacgccggcgctgccctggccggcaagctgaggagcggcgaccgcagcatggtggaggtgctggccgaccacccgggcgagctggtgcgcaccgacagccccaacttcctctgctccgtgctgcctacgcactggcgctgcaacaagaccctgcccatcgctttcaaggtggtggccctaggggatgttccagatggcactctggtcactgtgatggctggcaatgatgaaaactactcggctgagctgagaaatgctaccgcagccatgaagaaccaggttgcaagatttaatgacctcaggtttgtcggtcgaagtggaagagggaaaagcttcactctgaccatcactgtcttcacaaacccaccgcaagtcgccacctaccacagagccatcaaaatcacagtggatgggccccgagaacctcgaagacatcggcagaaactagatgatcagaccaagcccgggagcttgtccttttccgagcggctcagtgaactggagcagctgcggcgcacagccatgagggtcagcccacaccacccagcccccacgcccaaccctcgtgcctccctgaaccactccactgcctttaaccctcagcctcagagtcagatgcaggtgggtcctgagaaaagggtgccagcgatgcctggatcgcctgtggaagtgaagatacagtccagatcctcacctcccaccatgccacccctcccaccaataaatcctggaggaccgaggccagtgtccttcactcctactgcattaagcaatggcatcaaccattctcctcctaccctgaatggtgccccatcaccgccacagagattcagcaatggtcctgcctcctccacatcatctgcactcacaaatcagcaattgccagccacttgtggtgctcgacaactcagcaagttgaaacgctttcttaccactctgcaacagtttggcaatgacatctcccctgagattggggagaaggtgcggactcttgttcttgcactggtgaactcaacagtgacaattgaggaattccactgtaagctccaagaagccacaaactttccccttcgtccttttgtgattccatttctcaaggccaacctgcccctgctgcagcgggaactgctgcactgcgctcgggcggccaagcagaccccatcccagtacctggctcagcacgaacaccttctgctcaacacaagcattgcatcgcctgctgactcgtcagagttgctcatggaggtgcacggaaatgggaagaggcccagtccagagaggagagaagagaatagttttgatagagacacaattgctcctgagcctcctgccaagagagtatgtaccatcagccctgctcctcggcacagtcctgctctcactgtgcccctcatgaatcccgggggccaattccatcctacccctccacctcttcagcattacaccttagaggatattgcaacttctcacctgtatcgggaacccaacaagatgctagagcatcgagaagttcgtgatagacaccacagtcttggtctaaatggaggctatcaagatgagttggtagatcatcgtttgacagaaagggaatgggctgatgaatggaaacatcttgaccatgcgctgaattgcattatggaaatggtagagaaaacaaggcgctctatggcagttctgcggcgctgtcaggaatcagatcgtgaagaactcaactactggaaaagacggtacaatgaaaacacagagctgaggaaaacggggaccgagttggtctccaggcagcacagccctgggagtgcagattctctcagcaatgattctcagagagagttcaacagcaggccaggtacaggatacgtacctgtggagttttggaaaaaaacagaagaagctgtgaataaggtgaaaattcaggccatgtcagaagtacagaaggccgtcgctgaggcagagcagaaagcctttgaagtgattgcaacagagagagcacgaatggagcaaaccatagcggatgtcaagcggcaggccgcagaggatgctttcctcgtcatcaatgagcaagaggagtccacggagaactgctggaactgtggccgcaaagccagcgagacatgcagtggctgcaatatcgcgcgatactgtggctctttctgccagcacaaggactgggagcggcaccaccgcctctgtggtcagaacctgcatggccagagcccccacggccagggccggccgctgcttcctgtaggcaggggctcctctgccaggtccgccgactgcagcgtgcccagcccagccctcgacaagacctcggcaaccacatcgcgttcctcaacacctgcttctgtgacagctatcgacaccaacggactctgatgatgaggactagtccctgttcccagagcccacttttttttctttttttgaaataaaatagcctgtctttcagatctcaaaggctcttttcagagccaccaaaaaaaaaaaaaaaaaaaaaaaaaaaaaaaaaaaaaaaaaaaaaaaaaaaaaaaaaaaaaaaaaaaaaaaaaaaaaaaaaaaaaaaaaaaaaaaaaaaaa

SEQ ID NO: 897 - RNA, 2756 nt, synthetic construct
  misc_feature 1..2756: note = Artificial____RUNX1(1-241)_I_RUNX1T1b(22-604) mRNA wt
  source 1..2756: mol_type = other RNA
aggagagtcccgcagtcggcgtccagcggctctgcttgttcgtgtgtgtgtcgttgcaggccttattcaagcttaccatgcgtatccccgtagatgccagcacgagccgccgcttcacgccgccttccaccgcgctgagcccaggcaagatgagcgaggcgttgccgctgggcgccccggacgccggcgctgccctggccggcaagctgaggagcggcgaccgcagcatggtggaggtgctggccgaccacccgggcgagctggtgcgcaccgacagccccaacttcctctgctccgtgctgcctacgcactggcgctgcaacaagaccctgcccatcgctttcaaggtggtggccctaggggatgttccagatggcactctggtcactgtgatggctggcaatgatgaaaactactcggctgagctgagaaatgctaccgcagccatgaagaaccaggttgcaagatttaatgacctcaggtttgtcggtcgaagtggaagagggaaaagcttcactctgaccatcactgtcttcacaaacccaccgcaagtcgccacctaccacagagccatcaaaatcacagtggatgggccccgagaacctcgaagacatcggcagaaactagatgatcagaccaagcccgggagcttgtccttttccgagcggctcagtgaactggagcagctgcggcgcacagccatgagggtcagcccacaccacccagcccccacgcccaaccctcgtgcctccctgaaccactccactgcctttaaccctcagcctcagagtcagatgcagatcggtcctgagaaaagggtgccagcgatgcctggatcgcctgtggaagtgaagatacagtccagatcctcacctcccaccatgccacccctcccaccaataaatcctggaggaccgaggccagtgtccttcactcctactgcattaagcaatggcatcaaccattctcctcctaccctgaatggtgccccatcaccgccacagagattcagcaatggtcctgcctcctccacatcatctgcactcacaaatcagcaattgccagccacttgtggtgctcgacaactcagcaagttgaaacgctttcttaccactctgcaacagtttggcaatgacatctcccctgagattggggagaaggtgcggactcttgttcttgcactggtgaactcaacagtgacaattgaggaattccactgtaagctccaagaagccacaaactttccccttcgtccttttgtgattccatttctcaaggccaacctgcccctgctgcagcgggaactgctgcactgcgctcgggcggccaagcagaccccatcccagtacctggctcagcacgaacaccttctgctcaacacaagcattgcatcgcctgctgactcgtcagagttgctcatggaggtgcacggaaatgggaagaggcccagtccagagaggagagaagagaatagttttgatagagacacaattgctcctgagcctcctgccaagagagtatgtaccatcagccctgctcctcggcacagtcctgctctcactgtgcccctcatgaatcccgggggccaattccatcctacccctccacctcttcagcattacaccttagaggatattgcaacttctcacctgtatcgggaacccaacaagatgctagagcatcgagaagttcgtgatagacaccacagtcttggtctaaatggaggctatcaagatgagttggtagatcatcgtttgacagaaagggaatgggctgatgaatggaaacatcttgaccatgcgctgaattgcattatggaaatggtagagaaaacaaggcgctctatggcagttctgcggcgctgtcaggaatcagatcgtgaagaactcaactactggaaaagacggtacaatgaaaacacagagctgaggaaaacggggaccgagttggtctccaggcagcacagccctgggagtgcagattctctcagcaatgattctcagagagagttcaacagcaggccaggtacaggatacgtacctgtggagttttggaaaaaaacagaagaagctgtgaataaggtgaaaattcaggccatgtcagaagtacagaaggccgtcgctgaggcagagcagaaagcctttgaagtgattgcaacagagagagcacgaatggagcaaaccatagcggatgtcaagcggcaggccgcagaggatgctttcctcgtcatcaatgagcaagaggagtccacggagaactgctggaactgtggccgcaaagccagcgagacatgcagtggctgcaatatcgcgcgatactgtggctctttctgccagcacaaggactgggagcggcaccaccgcctctgtggtcagaacctgcatggccagagcccccacggccagggccggccgctgcttcctgtaggcaggggctcctctgccaggtccgccgactgcagcgtgcccagcccagccctcgacaagacctcggcaaccacatcgcgttcctcaacacctgcttctgtgacagctatcgacaccaacggactctgatgatgaggactagtccctgttcccagagcccacttttttttctttttttgaaataaaatagcctgtctttcagatctcaaaggctcttttcagagccaccaaaaaaaaaaaaaaaaaaaaaaaaaaaaaaaaaaaaaaaaaaaaaaaaaaaaaaaaaaaaaaaaaaaaaaaaaaaaaaaaaaaaaaaaaaaaaaaaaaaaa

SEQ ID NO: 898 - RNA, 1640 nt, synthetic construct
  misc_feature 1..1640: note = Homo sapiens__Q01196-1__RUNX1(K83E_R174Q) mRNA wt mod
  source 1..1640: mol_type = other RNA
aggagagtcccgcagtcggcgtccagcggctctgcttgttcgtgtgtgtgtcgttgcaggccttattcaagcttaccatgcgtatccccgtagatgccagcacgagccgccgcttcacgccgccttccaccgcgctgagcccaggcaagatgagcgaggcgttgccgctgggcgccccggacgccggcgctgccctggccggcaagctgaggagcggcgaccgcagcatggtggaggtgctggccgaccacccgggcgagctggtgcgcaccgacagccccaacttcctctgctccgtgctgcctacgcactggcgctgcaacgagaccctgcccatcgctttcaaggtggtggccctaggggatgttccagatggcactctggtcactgtgatggctggcaatgatgaaaactactcggctgagctgagaaatgctaccgcagccatgaagaaccaggttgcaagatttaatgacctcaggtttgtcggtcgaagtggaagagggaaaagtttcactctgaccatcactgtcttcacaaacccaccgcaagtcgccacctaccacagagccatcaaaatcacagtggatgggccccaggaacctcgaagacatcggcagaaactagatgatcagaccaagcccgggagcttgtccttttccgagcggctcagtgaactggagcagctgcggcgcacagccatgagggtcagcccacaccacccagcccccacgcccaaccctcgtgcctccctgaaccactccactgcctttaaccctcagcctcagagtcagatgcaggatacaaggcagatccaaccatccccaccgtggtcctacgatcagtcctaccaatacctgggatccattgcctctccttctgtgcacccagcaacgcccatttcacctggacgtgccagcggcatgacaaccctctctgcagaactttccagtcgactctcaacggcacccgacctgacagcgttcagcgacccgcgccagttccccgcgctgccctccatctccgacccccgcatgcactatccaggcgccttcacctactccccgacgccggtcacctcgggcatcggcatcggcatgtcggccatgggctcggccacgcgctaccacacctacctgccgccgccctaccccggctcgtcgcaagcgcagggaggcccgttccaagccagctcgccctcctaccacctgtactacggcgcctcggccggctcctaccagttctccatggtgggcggcgagcgctcgccgccgcgcatcctgccgccctgcaccaacgcctccaccggctccgcgctgctcaaccccagcctcccgaaccagagcgacgtggtggaggccgagggcagccacagcaactcccccaccaacatggcgccctccgcgcgcctggaggaggccgtgtggaggccctactgatgatgaggactagtccctgttcccagagcccacttttttttctttttttgaaataaaatagcctgtctttcagatctcaaaggctcttttcagagccaccaaaaaaaaaaaaaaaaaaaaaaaaaaaaaaaaaaaaaaaaaaaaaaaaaaaaaaaaaaaaaaaaaaaaaaaaaaaaaaaaaaaaaaaaaaaaaaaaaaaaa

SEQ ID NO: 899 - RNA, 2114 nt, synthetic construct
  misc_feature 1..2114: note = Homo sapiens____CBFbeta(1-165)_SMMHC(1527-1972) mRNA wt mod
  source 1..2114: mol_type = other RNA
aggagagtcccgcagtcggcgtccagcggctctgcttgttcgtgtgtgtgtcgttgcaggccttattcaagcttaccatgccgcgcgtcgtgcccgaccagagaagcaagtttgagaacgaggagttctttaggaagctgagccgcgagtgtgagattaagtacacgggctttagggaccggccccacgaggaacgccaggcacgcttccagaacgcctgccgcgacggccgctcggaaatcgcttttgtggccacaggaaccaatctgtctctccagttctttccggccagctggcagggagaacagcgacaaacacctagccgagagtatgtcgacttagaaagagaagcaggcaaggtatatttgaaggctcccatgattctgaatggagtctgtgttatctggaaaggctggattgatctccaaagactggatggtatgggctgtctggagtttgatgaggagcgagcccagcaggaggatgcattagcacaacaggcctttgaagaggctcggagaaggacacgcgaatttgaagatagagacaggtctcatcgggaggaaatggaggtccatgagctggagaagtccaagcgggccctggagacccagatggaggagatgaagacgcagctggaggaactggaggacgagctgcaagccacggaggacgccaaactgcggctggaagtcaacatgcaggcgctcaagggccagttcgaaagggatctccaagcccgggacgagcagaatgaggagaagaggaggcaactgcagagacagcttcacgagtatgagacggaactggaagacgagcgaaagcaacgtgccctggcagctgcagcaaagaagaagctggaaggggacctgaaagacctggagcttcaggccgactctgccatcaaggggagggaggaagccatcaagcagctacgcaaactgcaggctcagatgaaggactttcaaagagagctggaagatgcccgtgcctccagagatgagatctttgccacagccaaagagaatgagaagaaagccaagagcttggaagcagacctcatgcagctacaagaggacctcgccgccgctgagagggctcgcaaacaagcggacctcgagaaggaggaactggcagaggagctggccagtagcctgtcgggaaggaacgcactccaggacgagaagcgccgcctggaggcccggatcgcccagctggaggaggagctggaggaggagcagggcaacatggaggccatgagcgaccgggtccgcaaagccacacagcaggccgagcagctcagcaacgagctggccacagagcgcagcacggcccagaagaatgagagtgcccggcagcagctcgagcggcagaacaaggagctccggagcaagctccacgagatggagggggccgtcaagtccaagttcaagtccaccatcgcggcgctggaggccaagattgcacagctggaggagcaggtcgagcaggaggccagagagaaacaggcggccaccaagtcgctgaagcagaaagacaagaagctgaaggaaatcttgctccaggtggaggacgagcgcaagatggccgagcagtacaaggagcaggcagagaaaggcaatgccagggtcaagcagctgaagaggcagctggaggaggcagaggaggagtcccagcgcatcaacgccaaccgcaggaagctgcagcgggagctggatgaggccacggagagcaacgaggccatgggccgcgaggtgaacgcactcaagagcaagctcaggcgaggaaacgagacctctttcgttccttctagaaggtctggaggacgtagagttattgaaaatgcagatggttctgaggaggaaacggacactcgagacgcagacttcaatggaaccaaggccagtgaatgatgatgaggactagtccctgttcccagagcccacttttttttctttttttgaaataaaatagcctgtctttcagatctcaaaggctcttttcagagccaccaaaaaaaaaaaaaaaaaaaaaaaaaaaaaaaaaaaaaaaaaaaaaaaaaaaaaaaaaaaaaaaaaaaaaaaaaaaaaaaaaaaaaaaaaaaaaaaaaaaaa

SEQ ID NO: 900 - RNA, 1829 nt, synthetic construct
  misc_feature 1..1829: note = Artificial____CBFbeta(1-165)_SMMHC(1527-1877) mRNA wt mod
  source 1..1829: mol_type = other RNA
aggagagtcccgcagtcggcgtccagcggctctgcttgttcgtgtgtgtgtcgttgcaggccttattcaagcttaccatgccgcgcgtcgtgcccgaccagagaagcaagtttgagaacgaggagttctttaggaagctgagccgcgagtgtgagattaagtacacgggctttagggaccggccccacgaggaacgccaggcacgcttccagaacgcctgccgcgacggccgctcggaaatcgcttttgtggccacaggaaccaatctgtctctccagttctttccggccagctggcagggagaacagcgacaaacacctagccgagagtatgtcgacttagaaagagaagcaggcaaggtatatttgaaggctcccatgattctgaatggagtctgtgttatctggaaaggctggattgatctccaaagactggatggtatgggctgtctggagtttgatgaggagcgagcccagcaggaggatgcattagcacaacaggcctttgaagaggctcggagaaggacacgcgaatttgaagatagagacaggtctcatcgggaggaaatggaggtccatgagctggagaagtccaagcgggccctggagacccagatggaggagatgaagacgcagctggaggaactggaggacgagctgcaagccacggaggacgccaaactgcggctggaagtcaacatgcaggcgctcaagggccagttcgaaagggatctccaagcccgggacgagcagaatgaggagaagaggaggcaactgcagagacagcttcacgagtatgagacggaactggaagacgagcgaaagcaacgtgccctggcagctgcagcaaagaagaagctggaaggggacctgaaagacctggagcttcaggccgactctgccatcaaggggagggaggaagccatcaagcagctacgcaaactgcaggctcagatgaaggactttcaaagagagctggaagatgcccgtgcctccagagatgagatctttgccacagccaaagagaatgagaagaaagccaagagcttggaagcagacctcatgcagctacaagaggacctcgccgccgctgagagggctcgcaaacaagcggacctcgagaaggaggaactggcagaggagctggccagtagcctgtcgggaaggaacgcactccaggacgagaagcgccgcctggaggcccggatcgcccagctggaggaggagctggaggaggagcagggcaacatggaggccatgagcgaccgggtccgcaaagccacacagcaggccgagcagctcagcaacgagctggccacagagcgcagcacggcccagaagaatgagagtgcccggcagcagctcgagcggcagaacaaggagctccggagcaagctccacgagatggagggggccgtcaagtccaagttcaagtccaccatcgcggcgctggaggccaagattgcacagctggaggagcaggtcgagcaggaggccagagagaaacaggcggccaccaagtcgctgaagcagaaagacaagaagctgaaggaaatcttgctccaggtggaggacgagcgcaagatggccgagcagtacaaggagcaggcagagaaaggcaatgcctgatgatgaggactagtccctgttcccagagcccacttttttttctttttttgaaataaaatagcctgtctttcagatctcaaaggctcttttcagagccaccaaaaaaaaaaaaaaaaaaaaaaaaaaaaaaaaaaaaaaaaaaaaaaaaaaaaaaaaaaaaaaaaaaaaaaaaaaaaaaaaaaaaaaaaaaaaaaaaaaaaa

SEQ ID NO: 901 - RNA, 890 nt, synthetic construct
  misc_feature 1..890: note = Artificial____CBFbeta(1-165)_Linker_Lifeact mRNA wt mod
  source 1..890: mol_type = other RNA
aggagagtcccgcagtcggcgtccagcggctctgcttgttcgtgtgtgtgtcgttgcaggccttattcaagcttaccatgccgcgcgtcgtgcccgaccagagaagcaagtttgagaacgaggagttctttaggaagctgagccgcgagtgtgagattaagtacacgggctttagggaccggccccacgaggaacgccaggcacgcttccagaacgcctgccgcgacggccgctcggaaatcgcttttgtggccacaggaaccaatctgtctctccagttctttccggccagctggcagggagaacagcgacaaacacctagccgagagtatgtcgacttagaaagagaagcaggcaaggtatatttgaaggctcccatgattctgaatggagtctgtgttatctggaaaggctggattgatctccaaagactggatggtatgggctgtctggagtttgatgaggagcgagcccagcaggaggatgcattagcacaacaggcctttgaagaggctcggagaaggacacgcgaatttgaagatagagacaggtctcatcgggaggaaatggagggcgggagcggcgggtccggcgggagcggcggctccgggggcgggggcgtggccgacctgatcaagaagttcgagagcatctccaaggaggagggggacccgcccgtcgccacctgatgatgaggactagtccctgttcccagagcccacttttttttctttttttgaaataaaatagcctgtctttcagatctcaaaggctcttttcagagccaccaaaaaaaaaaaaaaaaaaaaaaaaaaaaaaaaaaaaaaaaaaaaaaaaaaaaaaaaaaaaaaaaaaaaaaaaaaaaaaaaaaaaaaaaaaaaaaaaaaaaa

SEQ ID NO: 902 - RNA, 857 nt, synthetic construct
  misc_feature 1..857: note = Artificial____CBFbeta(1-165)_HIF1alpha(549-575) mRNA wt mod
  source 1..857: mol_type = other RNA
aggagagtcccgcagtcggcgtccagcggctctgcttgttcgtgtgtgtgtcgttgcaggccttattcaagcttaccatgccgcgcgtcgtgcccgaccagagaagcaagtttgagaacgaggagttctttaggaagctgagccgcgagtgtgagattaagtacacgggctttagggaccggccccacgaggaacgccaggcacgcttccagaacgcctgccgcgacggccgctcggaaatcgcttttgtggccacaggaaccaatctgtctctccagttctttccggccagctggcagggagaacagcgacaaacacctagccgagagtatgtcgacttagaaagagaagcaggcaaggtatatttgaaggctcccatgattctgaatggagtctgtgttatctggaaaggctggattgatctccaaagactggatggtatgggctgtctggagtttgatgaggagcgagcccagcaggaggatgcattagcacaacaggcctttgaagaggctcggagaaggacacgcgaatttgaagatagagacaggtctcatcgggaggaaatggagccattttctactcaggacacagatttagacttggagatgttagctccctatatcccaatggatgatgacttccagttacgttgatgatgaggactagtccctgttcccagagcccacttttttttctttttttgaaataaaatagcctgtctttcagatctcaaaggctcttttcagagccaccaaaaaaaaaaaaaaaaaaaaaaaaaaaaaaaaaaaaaaaaaaaaaaaaaaaaaaaaaaaaaaaaaaaaaaaaaaaaaaaaaaaaaaaaaaaaaaaaaaaaa

SEQ ID NO: 903 - RNA, 902 nt, synthetic construct
  misc_feature 1..902: note Artificial____CBFbeta(1-165)_Linker_HIF1alpha(549-575) mRNA wt mod
  source 1..902: mol_type = other RNA
aggagagtcccgcagtcggcgtccagcggctctgcttgttcgtgtgtgtgtcgttgcaggccttattcaagcttaccatgccgcgcgtcgtgcccgaccagagaagcaagtttgagaacgaggagttctttaggaagctgagccgcgagtgtgagattaagtacacgggctttagggaccggccccacgaggaacgccaggcacgcttccagaacgcctgccgcgacggccgctcggaaatcgcttttgtggccacaggaaccaatctgtctctccagttctttccggccagctggcagggagaacagcgacaaacacctagccgagagtatgtcgacttagaaagagaagcaggcaaggtatatttgaaggctcccatgattctgaatggagtctgtgttatctggaaaggctggattgatctccaaagactggatggtatgggctgtctggagtttgatgaggagcgagcccagcaggaggatgcattagcacaacaggcctttgaagaggctcggagaaggacacgcgaatttgaagatagagacaggtctcatcgggaggaaatggagggcgggagcggcgggtccggcgggagcggcggctccgggggcgggccattttctactcaggacacagatttagacttggagatgttagctccctatatcccaatggatgatgacttccagttacgttgatgatgaggactagtccctgttcccagagcccacttttttttctttttttgaaataaaatagcctgtctttcagatctcaaaggctcttttcagagccaccaaaaaaaaaaaaaaaaaaaaaaaaaaaaaaaaaaaaaaaaaaaaaaaaaaaaaaaaaaaaaaaaaaaaaaaaaaaaaaaaaaaaaaaaaaaaaaaaaaaaa

SEQ ID NO: 904 - RNA, 2537 nt, synthetic construct
  misc_feature 1..2537: note = Artificial____RUNX1(1-177)_N_RUNX1T1a(31-604) mRNA wt mod
  source 1..2537: mol_type = other RNA
aggagagtcccgcagtcggcgtccagcggctctgcttgttcgtgtgtgtgtcgttgcaggccttattcaagcttaccatgcgtatccccgtagatgccagcacgagccgccgcttcacgccgccttccaccgcgctgagcccaggcaagatgagcgaggcgttgccgctgggcgccccggacgccggcgctgccctggccggcaagctgaggagcggcgaccgcagcatggtggaggtgctggccgaccacccgggcgagctggtgcgcaccgacagccccaacttcctctgctccgtgctgcctacgcactggcgctgcaacaagaccctgcccatcgctttcaaggtggtggccctaggggatgttccagatggcactctggtcactgtgatggctggcaatgatgaaaactactcggctgagctgagaaatgctaccgcagccatgaagaaccaggttgcaagatttaatgacctcaggtttgtcggtcgaagtggaagagggaaaagtttcactctgaccatcactgtcttcacaaacccaccgcaagtcgccacctaccacagagccatcaaaatcacagtggatgggccccgagaacctcgaaaccgtactgagaagcactccacaatgccagactcacctgtggatgtgaagacgcaatctaggctgactcctccaacaatgccacctcccccaactactcaaggagctccaagaaccagttcatttacaccgacaacgttaactaatggcacgagccattctcctacagccttgaatggcgccccctcaccacccaatggcttcagcaatgggccttcctcttcttcctcctcctctctggctaatcaacagctgcccccagcctgtggtgccaggcaactcagcaagctgaaaaggttccttactaccctgcagcagtttggcaatgacatttcacccgagataggagaaagagttcgcaccctcgttctgggacttgtgaactccactttgacaattgaagaatttcattccaaactgcaagaagctactaacttcccactgagaccttttgtcatcccatttttgaaggccaacttgcccctgctgcagcgtgagctcctccactgcgcaagactggccaaacagaaccctgcccagtacctcgcccagcatgaacagctgcttctggatgccagcaccacctcacctgttgactcctcagagctgcttctcgatgtgaacgaaaacgggaagaggcgaactccagacagaaccaaagaaaatggctttgacagagagcctttgcactcagaacatccaagcaagcgaccatgcactattagcccaggccagcggtacagtccaaataacggcttatcctaccagcccaatggcctgcctcaccctaccccacctccacctcagcattaccgtttggatgatatggccattgcccaccactacagggactcctatcgacaccccagccacagggacctcagggacagaaacagacctatggggttgcatggcacacgtcaagaagaaatgattgatcacagactaacagacagagaatgggcagaagagtggaaacatcttgaccatctgttaaactgcataatggacatggtagaaaaaacaaggcgatctctcaccgtactaaggcggtgtcaagaagcagaccgggaagaattgaattactggatccggcggtacagtgacgccgaggacttaaaaaaaggtggcggcagtagcagcagccactctaggcagcagagtcccgtcaacccagacccagttgcactagacgcgcatcgggagttccttcacaggcctgcgtctggatacgtgccagaggagatctggaagaaagctgaggaggccgtcaatgaggtgaagcgccaggcgatgacggagctgcagaaggccgtgtctgaggcggagcggaaagcccacgacatgatcacaacagagagggccaagatggagcgcacggtcgccgaggccaaacggcaggcggcggaggacgcactggcagttatcaatcagcaggaggattcaagcgagagttgctggaattgtggccgtaaagcgagtgaaacctgcagtggctgtaacacagcccgatactgtggctcattttgccagcacaaagactgggagaagcaccatcacatctgtggacagaccctgcaggcccagcagcagggagacacacctgcagtcagctcctctgtcacgcccaacagcggggctgggagcccgatggacacaccaccagcagccactccgaggtcaaccaccccgggaaccccttccaccatagagacaacccctcgctgatgatgaggactagtccctgttcccagagcccacttttttttctttttttgaaataaaatagcctgtctttcagatctcaaaggctcttttcagagccaccaaaaaaaaaaaaaaaaaaaaaaaaaaaaaaaaaaaaaaaaaaaaaaaaaaaaaaaaaaaaaaaaaaaaaaaaaaaaaaaaaaaaaaaaaaaaaaaaaaaaa

SEQ ID NO: 905 - RNA, 1052 nt, synthetic construct
  misc_feature 1..1052: note = Artificial____RUNX1(1-241)_RUNX1T1b(short) mRNA wt mod
  source 1..1052: mol_type = other RNA
aggagagtcccgcagtcggcgtccagcggctctgcttgttcgtgtgtgtgtcgttgcaggccttattcaagcttaccatgcgtatccccgtagatgccagcacgagccgccgcttcacgccgccttccaccgcgctgagcccaggcaagatgagcgaggcgttgccgctgggcgccccggacgccggcgctgccctggccggcaagctgaggagcggcgaccgcagcatggtggaggtgctggccgaccacccgggcgagctggtgcgcaccgacagccccaacttcctctgctccgtgctgcctacgcactggcgctgcaacaagaccctgcccatcgctttcaaggtggtggccctaggggatgttccagatggcactctggtcactgtgatggctggcaatgatgaaaactactcggctgagctgagaaatgctaccgcagccatgaagaaccaggttgcaagatttaatgacctcaggtttgtcggtcgaagtggaagagggaaaagtttcactctgaccatcactgtcttcacaaacccaccgcaagtcgccacctaccacagagccatcaaaatcacagtggatgggccccgagaacctcgaagacatcggcagaaactagatgatcagaccaagcccgggagcttgtccttttccgagcggctcagtgaactggagcagctgcggcgcacagccatgagggtcagcccacaccacccagcccccacgcccaaccctcgtgcctccctgaaccactccactgcctttaaccctcagcctcagagtcagatgcaggaggtgggcttctgccacgtcgcccaggtggggctgaagctcctgggctgatgatgaggactagtccctgttcccagagcccacttttttttctttttttgaaataaaatagcctgtctttcagatctcaaaggctcttttcagagccaccaaaaaaaaaaaaaaaaaaaaaaaaaaaaaaaaaaaaaaaaaaaaaaaaaaaaaaaaaaaaaaaaaaaaaaaaaaaaaaaaaaaaaaaaaaaaaaaaaaaaa

SEQ ID NO: 906 - RNA, 2756 nt, synthetic construct
  misc_feature 1..2756: note = Artificial____RUNX1(1-241)_V_RUNX1T1b(22-604) mRNA wt mod
  source 1..2756: mol_type = other RNA
aggagagtcccgcagtcggcgtccagcggctctgcttgttcgtgtgtgtgtcgttgcaggccttattcaagcttaccatgcgtatccccgtagatgccagcacgagccgccgcttcacgccgccttccaccgcgctgagcccaggcaagatgagcgaggcgttgccgctgggcgccccggacgccggcgctgccctggccggcaagctgaggagcggcgaccgcagcatggtggaggtgctggccgaccacccgggcgagctggtgcgcaccgacagccccaacttcctctgctccgtgctgcctacgcactggcgctgcaacaagaccctgcccatcgctttcaaggtggtggccctaggggatgttccagatggcactctggtcactgtgatggctggcaatgatgaaaactactcggctgagctgagaaatgctaccgcagccatgaagaaccaggttgcaagatttaatgacctcaggtttgtcggtcgaagtggaagagggaaaagtttcactctgaccatcactgtcttcacaaacccaccgcaagtcgccacctaccacagagccatcaaaatcacagtggatgggccccgagaacctcgaagacatcggcagaaactagatgatcagaccaagcccgggagcttgtccttttccgagcggctcagtgaactggagcagctgcggcgcacagccatgagggtcagcccacaccacccagcccccacgcccaaccctcgtgcctccctgaaccactccactgcctttaaccctcagcctcagagtcagatgcaggtgggtcctgagaaaagggtgccagcgatgcctggatcgcctgtggaagtgaagatacagtccagatcctcacctcccaccatgccacccctcccaccaataaatcctggaggaccgaggccagtgtccttcactcctactgcattaagcaatggcatcaaccattctcctcctaccctgaatggtgccccatcaccgccacagagattcagcaatggtcctgcctcctccacatcatctgcactcacaaatcagcaattgccagccacttgtggtgctcgacaactcagcaagttgaaacgctttcttaccactctgcaacagtttggcaatgacatctcccctgagattggggagaaggtgcggactcttgttcttgcactggtgaactcaacagtgacaattgaggagttccactgtaagctccaagaagccacaaactttccccttcgtccttttgtgattccatttctcaaggccaacctgcccctgctgcagcgggaactgctgcactgcgctcgggcggccaagcagaccccatcccagtacctggctcagcacgaacaccttctgctcaacacaagcattgcatcgcctgctgactcgtcagagttgctcatggaggtgcacggaaatgggaagaggcccagtccagagaggagagaagagaatagttttgatagagacacaattgctcctgagcctcctgccaagagagtatgtaccatcagccctgctcctcggcacagtcctgctctcactgtgcccctcatgaatcccgggggccaattccatcctacccctccacctcttcagcattacaccttagaggatattgcaacttctcacctgtatcgggaacccaacaagatgctagagcatcgagaagttcgtgatagacaccacagtcttggtctaaatggaggctatcaagatgagttggtagatcatcgtttgacagaaagggaatgggctgatgaatggaaacatcttgaccatgcgctgaattgcattatggaaatggtagagaaaacaaggcgctctatggcagttctgcggcgctgtcaggaatcagatcgtgaagaactcaactactggaaaagacggtacaatgaaaacacagagctgaggaaaacggggaccgagttggtctccaggcagcacagccctgggagtgcagattctctcagcaatgattctcagagagagttcaacagcaggccaggtacaggatacgtacctgtggagttttggaagaaaacagaagaagctgtgaataaggtgaaaattcaggccatgtcagaagtacagaaggccgtcgctgaggcagagcagaaagcctttgaagtgattgcaacagagagagcacgaatggagcaaaccatagcggatgtcaagcggcaggccgcagaggatgctttcctcgtcatcaatgagcaagaggagtccacggagaactgctggaactgtggccgcaaagccagcgagacatgcagtggctgcaatatcgcgcgatactgtggctctttctgccagcacaaggactgggagcggcaccaccgcctctgtggtcagaacctgcatggccagagcccccacggccagggccggccgctgcttcctgtaggcaggggctcctctgccaggtccgccgactgcagcgtgcccagcccagccctcgacaagacctcggcaaccacatcgcgttcctcaacacctgcttctgtgacagctatcgacaccaacggactctgatgatgaggactagtccctgttcccagagcccacttttttttctttttttgaaataaaatagcctgtctttcagatctcaaaggctcttttcagagccaccaaaaaaaaaaaaaaaaaaaaaaaaaaaaaaaaaaaaaaaaaaaaaaaaaaaaaaaaaaaaaaaaaaaaaaaaaaaaaaaaaaaaaaaaaaaaaaaaaaaaa

SEQ ID NO: 907 - RNA, 2756 nt, synthetic construct
  misc_feature 1..2756: note = Artificial____RUNX1(1-241)_I_RUNX1T1b(22-604) mRNA wt mod
  source 1..2756: mol_type = other RNA
aggagagtcccgcagtcggcgtccagcggctctgcttgttcgtgtgtgtgtcgttgcaggccttattcaagcttaccatgcgtatccccgtagatgccagcacgagccgccgcttcacgccgccttccaccgcgctgagcccaggcaagatgagcgaggcgttgccgctgggcgccccggacgccggcgctgccctggccggcaagctgaggagcggcgaccgcagcatggtggaggtgctggccgaccacccgggcgagctggtgcgcaccgacagccccaacttcctctgctccgtgctgcctacgcactggcgctgcaacaagaccctgcccatcgctttcaaggtggtggccctaggggatgttccagatggcactctggtcactgtgatggctggcaatgatgaaaactactcggctgagctgagaaatgctaccgcagccatgaagaaccaggttgcaagatttaatgacctcaggtttgtcggtcgaagtggaagagggaaaagtttcactctgaccatcactgtcttcacaaacccaccgcaagtcgccacctaccacagagccatcaaaatcacagtggatgggccccgagaacctcgaagacatcggcagaaactagatgatcagaccaagcccgggagcttgtccttttccgagcggctcagtgaactggagcagctgcggcgcacagccatgagggtcagcccacaccacccagcccccacgcccaaccctcgtgcctccctgaaccactccactgcctttaaccctcagcctcagagtcagatgcagatcggtcctgagaaaagggtgccagcgatgcctggatcgcctgtggaagtgaagatacagtccagatcctcacctcccaccatgccacccctcccaccaataaatcctggaggaccgaggccagtgtccttcactcctactgcattaagcaatggcatcaaccattctcctcctaccctgaatggtgccccatcaccgccacagagattcagcaatggtcctgcctcctccacatcatctgcactcacaaatcagcaattgccagccacttgtggtgctcgacaactcagcaagttgaaacgctttcttaccactctgcaacagtttggcaatgacatctcccctgagattggggagaaggtgcggactcttgttcttgcactggtgaactcaacagtgacaattgaggagttccactgtaagctccaagaagccacaaactttccccttcgtccttttgtgattccatttctcaaggccaacctgcccctgctgcagcgggaactgctgcactgcgctcgggcggccaagcagaccccatcccagtacctggctcagcacgaacaccttctgctcaacacaagcattgcatcgcctgctgactcgtcagagttgctcatggaggtgcacggaaatgggaagaggcccagtccagagaggagagaagagaatagttttgatagagacacaattgctcctgagcctcctgccaagagagtatgtaccatcagccctgctcctcggcacagtcctgctctcactgtgcccctcatgaatcccgggggccaattccatcctacccctccacctcttcagcattacaccttagaggatattgcaacttctcacctgtatcgggaacccaacaagatgctagagcatcgagaagttcgtgatagacaccacagtcttggtctaaatggaggctatcaagatgagttggtagatcatcgtttgacagaaagggaatgggctgatgaatggaaacatcttgaccatgcgctgaattgcattatggaaatggtagagaaaacaaggcgctctatggcagttctgcggcgctgtcaggaatcagatcgtgaagaactcaactactggaaaagacggtacaatgaaaacacagagctgaggaaaacggggaccgagttggtctccaggcagcacagccctgggagtgcagattctctcagcaatgattctcagagagagttcaacagcaggccaggtacaggatacgtacctgtggagttttggaagaaaacagaagaagctgtgaataaggtgaaaattcaggccatgtcagaagtacagaaggccgtcgctgaggcagagcagaaagcctttgaagtgattgcaacagagagagcacgaatggagcaaaccatagcggatgtcaagcggcaggccgcagaggatgctttcctcgtcatcaatgagcaagaggagtccacggagaactgctggaactgtggccgcaaagccagcgagacatgcagtggctgcaatatcgcgcgatactgtggctctttctgccagcacaaggactgggagcggcaccaccgcctctgtggtcagaacctgcatggccagagcccccacggccagggccggccgctgcttcctgtaggcaggggctcctctgccaggtccgccgactgcagcgtgcccagcccagccctcgacaagacctcggcaaccacatcgcgttcctcaacacctgcttctgtgacagctatcgacaccaacggactctgatgatgaggactagtccctgttcccagagcccacttttttttctttttttgaaataaaatagcctgtctttcagatctcaaaggctcttttcagagccaccaaaaaaaaaaaaaaaaaaaaaaaaaaaaaaaaaaaaaaaaaaaaaaaaaaaaaaaaaaaaaaaaaaaaaaaaaaaaaaaaaaaaaaaaaaaaaaaaaaaaa

SEQ ID NO: 908 - RNA, 1640 nt, synthetic construct
  misc_feature 1..1640: note = Homo sapiens__Q01196-1__RUNX1(K83E_R174Q) mRNA opt1
  source 1..1640: mol_type = other RNA
aggagagtcccgcagtcggcgtccagcggctctgcttgttcgtgtgtgtgtcgttgcaggccttattcaagcttaccatgcgcatccccgtggacgccagcacctcccggcgcttcaccccgcccagcacggccctgtcccccggcaagatgagcgaggcgctccccctgggggccccggacgccggcgccgccctggcggggaagctccggtccggcgaccgcagcatggtcgaggtgctggccgaccaccccggggagctggtgcggaccgactcccccaacttcctctgcagcgtcctgcccacccactggcgctgcaacgagaccctgccgatcgccttcaaggtggtggccctcggcgacgtccccgacggcacgctggtgaccgtgatggcggggaacgacgagaactactccgccgagctgcggaacgccaccgccgccatgaagaaccaggtcgcgcgcttcaacgacctccggttcgtgggccgcagcgggcggggcaagtccttcaccctgacgatcaccgtgttcaccaacccgccccaggtcgccacctaccaccgcgccatcaagatcacggtggacgggccccaggagccccgccggcaccgccagaagctggacgaccagaccaagcccggcagcctctccttcagcgagcggctgtccgagctggagcagctccgccggaccgccatgcgcgtgagcccccaccacccggcccccacccccaacccccgggcgtccctgaaccacagcacggccttcaacccgcagccccagtcccagatgcaggacacccgccagatccagcccagcccgccctggagctacgaccagtcctaccagtacctgggcagcatcgcctcccccagcgtccaccccgccacccccatctccccggggcgcgccagcggcatgaccacgctctccgcggagctgagctcccggctgagcaccgcccccgacctcaccgccttctccgacccccgccagttcccggccctgcccagcatctccgacccccggatgcactaccccggggccttcacctacagcccgacgcccgtgacctccggcatcggcatcgggatgagcgcgatgggctccgccacccgctaccacacctacctgcccccgccctaccccgggagctcccaggcccagggcgggcccttccaggccagcagcccctcctaccacctctactacggcgcgagcgccggctcctaccagttcagcatggtcgggggcgagcggtccccgccccgcatcctgccgccctgcacgaacgccagcaccgggtccgccctgctcaaccccagcctgcccaaccagtccgacgtggtggaggccgagggcagccactccaacagccccaccaacatggcgccctccgcccggctggaggaggccgtgtggcgcccgtactgatgatgaggactagtccctgttcccagagcccacttttttttctttttttgaaataaaatagcctgtctttcagatctcaaaggctcttttcagagccaccaaaaaaaaaaaaaaaaaaaaaaaaaaaaaaaaaaaaaaaaaaaaaaaaaaaaaaaaaaaaaaaaaaaaaaaaaaaaaaaaaaaaaaaaaaaaaaaaaaaaa

SEQ ID NO: 909 - RNA, 2114 nt, synthetic construct
  misc_feature 1..2114: note = Homo sapiens____CBFbeta(1-165)_SMMHC(1527-1972) mRNA opt1
  source 1..2114: mol_type = other RNA
aggagagtcccgcagtcggcgtccagcggctctgcttgttcgtgtgtgtgtcgttgcaggccttattcaagcttaccatgccccgcgtggtcccggaccagcggagcaagttcgagaacgaggagttcttccgcaagctgtcccgggagtgcgagatcaagtacaccggcttccgcgaccggccccacgaggagcgccaggcccggttccagaacgcctgccgcgacgggcggagcgagatcgcgttcgtggccaccggcacgaacctctccctgcagttcttccccgccagctggcagggggagcagcgccagaccccctcccgggagtacgtggacctggagcgcgaggccggcaaggtctacctcaaggccccgatgatcctgaacggggtgtgcgtgatctggaagggctggatcgacctgcagcggctcgacggcatggggtgcctggagttcgacgaggagcgcgcgcagcaggaggacgccctggcccagcaggccttcgaggaggcgcggcgccggacccgcgagttcgaggaccgggaccgcagccaccgggaggagatggaggtgcacgagctggagaagtccaagcgcgccctcgagacccagatggaggagatgaagacccagctggaggagctggaggacgagctccaggccacggaggacgcgaagctgcggctggaggtcaacatgcaggccctcaagggccagttcgagcgcgacctgcaggcccgggacgagcagaacgaggagaagcgccggcagctgcagcgccagctccacgagtacgagaccgagctggaggacgagcggaagcagcgcgccctggccgcggccgccaagaagaagctcgagggggacctgaaggacctggagctccaggccgacagcgcgatcaagggccgggaggaggccatcaagcagctgcgcaagctgcaggcccagatgaaggacttccagcgggagctcgaggacgcccgcgccagccgggacgagatcttcgcgaccgccaaggagaacgagaagaaggccaagtccctggaggccgacctgatgcagctccaggaggacctggccgcggccgagcgcgcccggaagcaggccgacctggagaaggaggagctcgccgaggagctggcgagctccctgagcgggcgcaacgccctccaggacgagaagcggcgcctggaggcccggatcgcccagctggaggaggagctcgaggaggagcagggcaacatggaggccatgtccgaccgcgtgcggaaggcgacccagcaggccgagcagctgagcaacgagctggccacggagcgctccaccgcccagaagaacgagagcgcgcgccagcagctcgagcggcagaacaaggagctgcgctccaagctgcacgagatggagggggccgtgaagtccaagttcaagagcaccatcgccgccctcgaggccaagatcgcgcagctggaggagcaggtcgagcaggaggcccgggagaagcaggccgccaccaagagcctgaagcagaaggacaagaagctcaaggagatcctgctccaggtggaggacgagcgcaagatggccgagcagtacaaggagcaggcggagaagggcaacgcccgggtgaagcagctgaagcgccagctggaggaggccgaggaggagtcccagcggatcaacgccaaccgccggaagctgcagcgcgagctcgacgaggccacggagagcaacgaggcgatgggccgggaggtcaacgccctgaagtccaagctgcgccgggggaacgagaccagcttcgtgccctcccgccggagcggcgggcgccgggtgatcgagaacgccgacggcagcgaggaggagaccgacacccgcgacgccgacttcaacgggacgaaggcgtccgagtgatgatgaggactagtccctgttcccagagcccacttttttttctttttttgaaataaaatagcctgtctttcagatctcaaaggctcttttcagagccaccaaaaaaaaaaaaaaaaaaaaaaaaaaaaaaaaaaaaaaaaaaaaaaaaaaaaaaaaaaaaaaaaaaaaaaaaaaaaaaaaaaaaaaaaaaaaaaaaaaaaa

SEQ ID NO: 910 - RNA, 1829 nt, synthetic construct
  misc_feature 1..1829: note = Artificial____CBFbeta(1-165)_SMMHC(1527-1877) mRNA opt1
  source 1..1829: mol_type = other RNA
aggagagtcccgcagtcggcgtccagcggctctgcttgttcgtgtgtgtgtcgttgcaggccttattcaagcttaccatgccccgcgtggtcccggaccagcggagcaagttcgagaacgaggagttcttccgcaagctgtcccgggagtgcgagatcaagtacaccggcttccgcgaccggccccacgaggagcgccaggcccggttccagaacgcctgccgcgacgggcggagcgagatcgcgttcgtggccaccggcacgaacctctccctgcagttcttccccgccagctggcagggggagcagcgccagaccccctcccgggagtacgtggacctggagcgcgaggccggcaaggtctacctcaaggccccgatgatcctgaacggggtgtgcgtgatctggaagggctggatcgacctgcagcggctcgacggcatggggtgcctggagttcgacgaggagcgcgcgcagcaggaggacgccctggcccagcaggccttcgaggaggcgcggcgccggacccgcgagttcgaggaccgggaccgcagccaccgggaggagatggaggtgcacgagctggagaagtccaagcgcgccctcgagacccagatggaggagatgaagacccagctggaggagctggaggacgagctccaggccacggaggacgcgaagctgcggctggaggtcaacatgcaggccctcaagggccagttcgagcgcgacctgcaggcccgggacgagcagaacgaggagaagcgccggcagctgcagcgccagctccacgagtacgagaccgagctggaggacgagcggaagcagcgcgccctggccgcggccgccaagaagaagctcgagggggacctgaaggacctggagctccaggccgacagcgcgatcaagggccgggaggaggccatcaagcagctgcgcaagctgcaggcccagatgaaggacttccagcgggagctcgaggacgcccgcgccagccgggacgagatcttcgcgaccgccaaggagaacgagaagaaggccaagtccctggaggccgacctgatgcagctccaggaggacctggccgcggccgagcgcgcccggaagcaggccgacctggagaaggaggagctcgccgaggagctggcgagctccctgagcgggcgcaacgccctccaggacgagaagcggcgcctggaggcccggatcgcccagctggaggaggagctcgaggaggagcagggcaacatggaggccatgtccgaccgcgtgcggaaggcgacccagcaggccgagcagctgagcaacgagctggccacggagcgctccaccgcccagaagaacgagagcgcgcgccagcagctcgagcggcagaacaaggagctgcgctccaagctgcacgagatggagggggccgtgaagtccaagttcaagagcaccatcgccgccctcgaggccaagatcgcgcagctggaggagcaggtcgagcaggaggcccgggagaagcaggccgccaccaagagcctgaagcagaaggacaagaagctcaaggagatcctgctccaggtggaggacgagcgcaagatggccgagcagtacaaggagcaggcggagaagggcaacgcctgatgatgaggactagtccctgttcccagagcccacttttttttctttttttgaaataaaatagcctgtctttcagatctcaaaggctcttttcagagccaccaaaaaaaaaaaaaaaaaaaaaaaaaaaaaaaaaaaaaaaaaaaaaaaaaaaaaaaaaaaaaaaaaaaaaaaaaaaaaaaaaaaaaaaaaaaaaaaaaaaaa

SEQ ID NO: 911 - RNA, 890 nt, synthetic construct
  misc_feature 1..890: note = Artificial____CBFbeta(1-165)_Linker_Lifeact mRNA opt1
  source 1..890: mol_type = other RNA
aggagagtcccgcagtcggcgtccagcggctctgcttgttcgtgtgtgtgtcgttgcaggccttattcaagcttaccatgccccgcgtggtcccggaccagcggagcaagttcgagaacgaggagttcttccgcaagctgtcccgggagtgcgagatcaagtacaccggcttccgcgaccggccccacgaggagcgccaggcccggttccagaacgcctgccgcgacgggcggagcgagatcgcgttcgtggccaccggcacgaacctctccctgcagttcttccccgccagctggcagggggagcagcgccagaccccctcccgggagtacgtggacctggagcgcgaggccggcaaggtctacctcaaggccccgatgatcctgaacggggtgtgcgtgatctggaagggctggatcgacctgcagcggctcgacggcatggggtgcctggagttcgacgaggagcgcgcgcagcaggaggacgccctggcccagcaggccttcgaggaggcgcggcgccggacccgcgagttcgaggaccgggaccgcagccaccgggaggagatggagggcgggagcggcgggtccggcgggagcggcggctccgggggcgggggcgtggccgacctgatcaagaagttcgagagcatctccaaggaggagggggacccgcccgtcgccacctgatgatgaggactagtccctgttcccagagcccacttttttttctttttttgaaataaaatagcctgtctttcagatctcaaaggctcttttcagagccaccaaaaaaaaaaaaaaaaaaaaaaaaaaaaaaaaaaaaaaaaaaaaaaaaaaaaaaaaaaaaaaaaaaaaaaaaaaaaaaaaaaaaaaaaaaaaaaaaaaaaa

SEQ ID NO: 912 - RNA, 857 nt, synthetic construct
  misc_feature 1..857: note = Artificial____CBFbeta(1-165)_HIF1alpha(549-575) mRNA opt1
  source 1..857: mol_type = other RNA
aggagagtcccgcagtcggcgtccagcggctctgcttgttcgtgtgtgtgtcgttgcaggccttattcaagcttaccatgccccgcgtggtcccggaccagcggagcaagttcgagaacgaggagttcttccgcaagctgtcccgggagtgcgagatcaagtacaccggcttccgcgaccggccccacgaggagcgccaggcccggttccagaacgcctgccgcgacgggcggagcgagatcgcgttcgtggccaccggcacgaacctctccctgcagttcttccccgccagctggcagggggagcagcgccagaccccctcccgggagtacgtggacctggagcgcgaggccggcaaggtctacctcaaggccccgatgatcctgaacggggtgtgcgtgatctggaagggctggatcgacctgcagcggctcgacggcatggggtgcctggagttcgacgaggagcgcgcgcagcaggaggacgccctggcccagcaggccttcgaggaggcgcggcgccggacccgcgagttcgaggaccgggaccgcagccaccgggaggagatggagcccttcagcacccaggacaccgacctggacctcgagatgctggccccgtacatccccatggacgacgacttccagctgcgctgatgatgaggactagtccctgttcccagagcccacttttttttctttttttgaaataaaatagcctgtctttcagatctcaaaggctcttttcagagccaccaaaaaaaaaaaaaaaaaaaaaaaaaaaaaaaaaaaaaaaaaaaaaaaaaaaaaaaaaaaaaaaaaaaaaaaaaaaaaaaaaaaaaaaaaaaaaaaaaaaaa

SEQ ID NO: 913 - RNA, 902 nt, synthetic construct
  misc_feature 1..902: note Artificial____CBFbeta(1-165)_Linker_HIF1alpha(549-575) mRNA opt1
  source 1..902: mol_type = other RNA
aggagagtcccgcagtcggcgtccagcggctctgcttgttcgtgtgtgtgtcgttgcaggccttattcaagcttaccatgccccgcgtggtcccggaccagcggagcaagttcgagaacgaggagttcttccgcaagctgtcccgggagtgcgagatcaagtacaccggcttccgcgaccggccccacgaggagcgccaggcccggttccagaacgcctgccgcgacgggcggagcgagatcgcgttcgtggccaccggcacgaacctctccctgcagttcttccccgccagctggcagggggagcagcgccagaccccctcccgggagtacgtggacctggagcgcgaggccggcaaggtctacctcaaggccccgatgatcctgaacggggtgtgcgtgatctggaagggctggatcgacctgcagcggctcgacggcatggggtgcctggagttcgacgaggagcgcgcgcagcaggaggacgccctggcccagcaggccttcgaggaggcgcggcgccggacccgcgagttcgaggaccgggaccgcagccaccgggaggagatggagggcgggagcggcgggtccggcgggagcggcggctccgggggcgggcccttcagcacccaggacaccgacctggacctcgagatgctggccccgtacatccccatggacgacgacttccagctgcgctgatgatgaggactagtccctgttcccagagcccacttttttttctttttttgaaataaaatagcctgtctttcagatctcaaaggctcttttcagagccaccaaaaaaaaaaaaaaaaaaaaaaaaaaaaaaaaaaaaaaaaaaaaaaaaaaaaaaaaaaaaaaaaaaaaaaaaaaaaaaaaaaaaaaaaaaaaaaaaaaaaa

SEQ ID NO: 914 - RNA, 2537 nt, synthetic construct
  misc_feature 1..2537: note = Artificial____RUNX1(1-177)_N_RUNX1T1a(31-604) mRNA opt1
  source 1..2537: mol_type = other RNA
aggagagtcccgcagtcggcgtccagcggctctgcttgttcgtgtgtgtgtcgttgcaggccttattcaagcttaccatgcgcatccccgtggacgccagcacctcccggcgcttcaccccgcccagcacggccctgtcccccggcaagatgagcgaggcgctccccctgggggccccggacgccggcgccgccctggcggggaagctccggtccggcgaccgcagcatggtcgaggtgctggccgaccaccccggggagctggtgcggaccgactcccccaacttcctctgcagcgtcctgcccacccactggcgctgcaacaagaccctgccgatcgccttcaaggtggtggccctcggcgacgtccccgacggcacgctggtgaccgtgatggcggggaacgacgagaactactccgccgagctgcggaacgccaccgccgccatgaagaaccaggtcgcgcgcttcaacgacctccggttcgtgggccgcagcgggcggggcaagtccttcaccctgacgatcaccgtgttcaccaacccgccccaggtcgccacctaccaccgcgccatcaagatcacggtggacgggccccgggagccccgcaaccggaccgagaagcacagcacgatgcccgactccccggtggacgtgaagacccagagccgcctgaccccgcccaccatgcccccgccgcccacgacccagggcgcgccccggacctccagcttcacccccacgaccctgaccaacgggacctcccacagccccacggccctcaacggcgccccctccccgcccaacgggttcagcaacggcccctccagctccagctccagctccctggccaaccagcagctgccgcccgcctgcggcgcccgccagctcagcaagctgaagcggttcctgaccaccctccagcagttcgggaacgacatctcccccgagatcggcgagcgcgtccggaccctggtgctggggctcgtgaacagcacgctgaccatcgaggagttccacagcaagctgcaggaggcgaccaacttccccctccgccccttcgtcatccccttcctgaaggccaacctgcccctcctgcagcgggagctgctccactgcgcccgcctggccaagcagaaccccgcgcagtacctggcccagcacgagcagctcctgctggacgcctccaccacgagccccgtggactccagcgagctcctgctggacgtgaacgagaacggcaagcggcgcacccccgaccggaccaaggagaacgggttcgaccgcgagccgctccactccgagcaccccagcaagcggccctgcaccatctcccccggccagcgctacagcccgaacaacggcctgtcctaccagcccaacgggctgccccacccgacgcccccgccgccccagcactaccggctcgacgacatggccatcgcccaccactaccgcgacagctaccggcacccctcccaccgcgacctgcgcgaccggaaccgccccatgggcctgcacgggacccggcaggaggagatgatcgaccaccgcctcaccgaccgggagtgggcggaggagtggaagcacctggaccacctcctgaactgcatcatggacatggtcgagaagacccgccggagcctgacggtgctgcgccggtgccaggaggccgaccgcgaggagctcaactactggatccggcgctactccgacgccgaggacctgaagaagggcggcgggagctccagctcccacagccggcagcagtcccccgtgaaccccgaccccgtcgccctggacgcccaccgcgagttcctccaccggcccgcgagcggctacgtgcccgaggagatctggaagaaggccgaggaggccgtgaacgaggtcaagcgccaggccatgaccgagctgcagaaggccgtgagcgaggcggagcggaaggcccacgacatgatcaccaccgagcgcgccaagatggagcggacggtggccgaggccaagcgccaggcggccgaggacgccctggccgtcatcaaccagcaggaggactccagcgagtcctgctggaactgcgggcgcaaggcgagcgagacctgctccggctgcaacaccgcccggtactgcgggagcttctgccagcacaaggactgggagaagcaccaccacatctgcggccagaccctgcaggcccagcagcagggcgacacgccggccgtgtccagctccgtgacccccaacagcggggccggctcccccatggacacgcccccggcggccacgccccgcagcaccacccccgggaccccctccaccatcgagaccaccccgcggtgatgatgaggactagtccctgttcccagagcccacttttttttctttttttgaaataaaatagcctgtctttcagatctcaaaggctcttttcagagccaccaaaaaaaaaaaaaaaaaaaaaaaaaaaaaaaaaaaaaaaaaaaaaaaaaaaaaaaaaaaaaaaaaaaaaaaaaaaaaaaaaaaaaaaaaaaaaaaaaaaaa

SEQ ID NO: 915 - RNA, 1052 nt, synthetic construct
  misc_feature 1..1052: note = Artificial____RUNX1(1-241)_RUNX1T1b(short) mRNA opt1
  source 1..1052: mol_type = other RNA
aggagagtcccgcagtcggcgtccagcggctctgcttgttcgtgtgtgtgtcgttgcaggccttattcaagcttaccatgcgcatccccgtggacgccagcacctcccggcgcttcaccccgcccagcacggccctgtcccccggcaagatgagcgaggcgctccccctgggggccccggacgccggcgccgccctggcggggaagctccggtccggcgaccgcagcatggtcgaggtgctggccgaccaccccggggagctggtgcggaccgactcccccaacttcctctgcagcgtcctgcccacccactggcgctgcaacaagaccctgccgatcgccttcaaggtggtggccctcggcgacgtccccgacggcacgctggtgaccgtgatggcggggaacgacgagaactactccgccgagctgcggaacgccaccgccgccatgaagaaccaggtcgcgcgcttcaacgacctccggttcgtgggccgcagcgggcggggcaagtccttcaccctgacgatcaccgtgttcaccaacccgccccaggtcgccacctaccaccgcgccatcaagatcacggtggacgggccccgggagccccgccggcaccgccagaagctggacgaccagaccaagcccggcagcctctccttcagcgagcggctgtccgagctggagcagctccgccggaccgccatgcgcgtgagcccccaccacccggcccccacccccaacccccgggcgtccctgaaccacagcacggccttcaacccgcagccccagtcccagatgcaggaggtgggcttctgccacgtcgcccaggtggggctgaagctcctgggctgatgatgaggactagtccctgttcccagagcccacttttttttctttttttgaaataaaatagcctgtctttcagatctcaaaggctcttttcagagccaccaaaaaaaaaaaaaaaaaaaaaaaaaaaaaaaaaaaaaaaaaaaaaaaaaaaaaaaaaaaaaaaaaaaaaaaaaaaaaaaaaaaaaaaaaaaaaaaaaaaaa

SEQ ID NO: 916 - RNA, 2756 nt, synthetic construct
  misc_feature 1..2756: note = Artificial____RUNX1(1-241)_V_RUNX1T1b(22-604) mRNA opt1
  source 1..2756: mol_type = other RNA
aggagagtcccgcagtcggcgtccagcggctctgcttgttcgtgtgtgtgtcgttgcaggccttattcaagcttaccatgcgcatccccgtggacgccagcacctcccggcgcttcaccccgcccagcacggccctgtcccccggcaagatgagcgaggcgctccccctgggggccccggacgccggcgccgccctggcggggaagctccggtccggcgaccgcagcatggtcgaggtgctggccgaccaccccggggagctggtgcggaccgactcccccaacttcctctgcagcgtcctgcccacccactggcgctgcaacaagaccctgccgatcgccttcaaggtggtggccctcggcgacgtccccgacggcacgctggtgaccgtgatggcggggaacgacgagaactactccgccgagctgcggaacgccaccgccgccatgaagaaccaggtcgcgcgcttcaacgacctccggttcgtgggccgcagcgggcggggcaagtccttcaccctgacgatcaccgtgttcaccaacccgccccaggtcgccacctaccaccgcgccatcaagatcacggtggacgggccccgggagccccgccggcaccgccagaagctggacgaccagaccaagcccggcagcctctccttcagcgagcggctgtccgagctggagcagctccgccggaccgccatgcgcgtgagcccccaccacccggcccccacccccaacccccgggcgtccctgaaccacagcacggccttcaacccgcagccccagtcccagatgcaggtggggcccgagaagcgggtgccggcgatgcccggcagccccgtggaggtcaagatccagtcccgcagctccccgcccaccatgccgcccctgccgcccatcaaccccgggggcccccggcccgtgagcttcacccccacggccctgtccaacgggatcaaccactccccgcccaccctcaacggcgcccccagcccgccccagcgcttcagcaacggccccgcctccagcacctccagcgccctgaccaaccagcagctgcccgcgacgtgcggggcccggcagctctccaagctgaagcgcttcctgaccaccctccagcagttcggcaacgacatcagccccgagatcggggagaaggtgcggaccctggtcctggccctcgtgaactccacggtgaccatcgaggagttccactgcaagctgcaggaggccaccaacttccccctgcgccccttcgtcatccccttcctcaaggcgaacctgccgctgctccagcgggagctgctgcactgcgcccgcgccgccaagcagacccccagccagtacctcgcccagcacgagcacctcctgctgaacacgtccatcgcgagccccgccgacagctccgagctgctgatggaggtgcacggcaacgggaagcggcccagcccggagcgccgggaggagaactccttcgaccgcgacaccatcgcccccgagcccccggccaagcgggtgtgcaccatcagccccgcgccccgccactcccccgccctcaccgtcccgctgatgaaccccggcggccagttccaccccacgcccccgcccctgcagcactacaccctcgaggacatcgccaccagccacctgtaccgggagcccaacaagatgctggagcaccgcgaggtgcgggaccgccaccactccctcgggctgaacggcgggtaccaggacgagctggtggaccaccggctcaccgagcgcgagtgggccgacgagtggaagcacctggaccacgccctgaactgcatcatggagatggtcgagaagacgcgccggagcatggccgtgctccgccggtgccaggagtccgaccgcgaggagctgaactactggaagcggcgctacaacgagaacaccgagctgcggaagaccggcaccgagctcgtgagccgccagcactcccccggcagcgcggactccctgagcaacgactcccagcgggagttcaacagccgcccggggacgggctacgtccccgtggagttctggaagaagaccgaggaggccgtgaacaaggtcaagatccaggccatgtccgaggtgcagaaggccgtggccgaggcggagcagaaggccttcgaggtcatcgccaccgagcgggcccgcatggagcagaccatcgcggacgtgaagcggcaggccgccgaggacgccttcctggtcatcaacgagcaggaggagagcacggagaactgctggaactgcgggcgcaaggcctccgagacctgcagcggctgcaacatcgcgcggtactgcgggagcttctgccagcacaaggactgggagcgccaccaccggctctgcggccagaacctgcacggccagtccccgcacgggcagggccgccccctgctgcccgtggggcggggcagctccgcccgcagcgccgactgctccgtgcccagccccgccctcgacaagacctccgccaccacgagccgctccagcacccccgcgtccgtcaccgccatcgacaccaacgggctgtgatgatgaggactagtccctgttcccagagcccacttttttttctttttttgaaataaaatagcctgtctttcagatctcaaaggctcttttcagagccaccaaaaaaaaaaaaaaaaaaaaaaaaaaaaaaaaaaaaaaaaaaaaaaaaaaaaaaaaaaaaaaaaaaaaaaaaaaaaaaaaaaaaaaaaaaaaaaaaaaaaa

SEQ ID NO: 917 - RNA, 2756 nt, synthetic construct
  misc_feature 1..2756: note = Artificial____RUNX1(1-241)_I_RUNX1T1b(22-604) mRNA opt1
  source 1..2756: mol_type = other RNA
aggagagtcccgcagtcggcgtccagcggctctgcttgttcgtgtgtgtgtcgttgcaggccttattcaagcttaccatgcgcatccccgtggacgccagcacctcccggcgcttcaccccgcccagcacggccctgtcccccggcaagatgagcgaggcgctccccctgggggccccggacgccggcgccgccctggcggggaagctccggtccggcgaccgcagcatggtcgaggtgctggccgaccaccccggggagctggtgcggaccgactcccccaacttcctctgcagcgtcctgcccacccactggcgctgcaacaagaccctgccgatcgccttcaaggtggtggccctcggcgacgtccccgacggcacgctggtgaccgtgatggcggggaacgacgagaactactccgccgagctgcggaacgccaccgccgccatgaagaaccaggtcgcgcgcttcaacgacctccggttcgtgggccgcagcgggcggggcaagtccttcaccctgacgatcaccgtgttcaccaacccgccccaggtcgccacctaccaccgcgccatcaagatcacggtggacgggccccgggagccccgccggcaccgccagaagctggacgaccagaccaagcccggcagcctctccttcagcgagcggctgtccgagctggagcagctccgccggaccgccatgcgcgtgagcccccaccacccggcccccacccccaacccccgggcgtccctgaaccacagcacggccttcaacccgcagccccagtcccagatgcagatcgggcccgagaagcgggtgccggcgatgcccggcagccccgtggaggtcaagatccagtcccgcagctccccgcccaccatgccgcccctgccgcccatcaaccccgggggcccccggcccgtgagcttcacccccacggccctgtccaacgggatcaaccactccccgcccaccctcaacggcgcccccagcccgccccagcgcttcagcaacggccccgcctccagcacctccagcgccctgaccaaccagcagctgcccgcgacgtgcggggcccggcagctctccaagctgaagcgcttcctgaccaccctccagcagttcggcaacgacatcagccccgagatcggggagaaggtgcggaccctggtcctggccctcgtgaactccacggtgaccatcgaggagttccactgcaagctgcaggaggccaccaacttccccctgcgccccttcgtcatccccttcctcaaggcgaacctgccgctgctccagcgggagctgctgcactgcgcccgcgccgccaagcagacccccagccagtacctcgcccagcacgagcacctcctgctgaacacgtccatcgcgagccccgccgacagctccgagctgctgatggaggtgcacggcaacgggaagcggcccagcccggagcgccgggaggagaactccttcgaccgcgacaccatcgcccccgagcccccggccaagcgggtgtgcaccatcagccccgcgccccgccactcccccgccctcaccgtcccgctgatgaaccccggcggccagttccaccccacgcccccgcccctgcagcactacaccctcgaggacatcgccaccagccacctgtaccgggagcccaacaagatgctggagcaccgcgaggtgcgggaccgccaccactccctcgggctgaacggcgggtaccaggacgagctggtggaccaccggctcaccgagcgcgagtgggccgacgagtggaagcacctggaccacgccctgaactgcatcatggagatggtcgagaagacgcgccggagcatggccgtgctccgccggtgccaggagtccgaccgcgaggagctgaactactggaagcggcgctacaacgagaacaccgagctgcggaagaccggcaccgagctcgtgagccgccagcactcccccggcagcgcggactccctgagcaacgactcccagcgggagttcaacagccgcccggggacgggctacgtccccgtggagttctggaagaagaccgaggaggccgtgaacaaggtcaagatccaggccatgtccgaggtgcagaaggccgtggccgaggcggagcagaaggccttcgaggtcatcgccaccgagcgggcccgcatggagcagaccatcgcggacgtgaagcggcaggccgccgaggacgccttcctggtcatcaacgagcaggaggagagcacggagaactgctggaactgcgggcgcaaggcctccgagacctgcagcggctgcaacatcgcgcggtactgcgggagcttctgccagcacaaggactgggagcgccaccaccggctctgcggccagaacctgcacggccagtccccgcacgggcagggccgccccctgctgcccgtggggcggggcagctccgcccgcagcgccgactgctccgtgcccagccccgccctcgacaagacctccgccaccacgagccgctccagcacccccgcgtccgtcaccgccatcgacaccaacgggctgtgatgatgaggactagtccctgttcccagagcccacttttttttctttttttgaaataaaatagcctgtctttcagatctcaaaggctcttttcagagccaccaaaaaaaaaaaaaaaaaaaaaaaaaaaaaaaaaaaaaaaaaaaaaaaaaaaaaaaaaaaaaaaaaaaaaaaaaaaaaaaaaaaaaaaaaaaaaaaaaaaaa

SEQ ID NO: 918 - RNA, 1640 nt, synthetic construct
  misc_feature 1..1640: note = Homo sapiens__Q01196-1__RUNX1(K83E_R174Q) mRNA opt1
  source 1..1640: mol_type = other RNA
aggagagtcccgcagtcggcgtccagcggctctgcttgttcgtgtgtgtgtcgttgcaggccttattcaagcttaccatgcgcatccccgtggacgccagcacctcccggcgcttcaccccgcccagcacggccctgtcccccggcaagatgagcgaggcgctccccctgggggccccggacgccggcgccgccctggcggggaagctccggtccggcgaccgcagcatggtcgaggtgctggccgaccaccccggggagctggtgcggaccgactcccccaacttcctctgcagcgtcctgcccacccactggcgctgcaacgagaccctgccgatcgccttcaaggtggtggccctcggcgacgtccccgacggcacgctggtgaccgtgatggcggggaacgacgagaactactccgccgagctgcggaacgccaccgccgccatgaagaaccaggtcgcgcgcttcaacgacctccggttcgtgggccgcagcgggcggggcaagtccttcaccctgacgatcaccgtgttcaccaacccgccccaggtcgccacctaccaccgcgccatcaagatcacggtggacgggccccaggagccccggcgccaccggcagaagctggacgaccagaccaagcccggcagcctctccttcagcgagcgcctgtccgagctggagcagctccggcgcaccgccatgcgggtgagcccccaccacccggcccccacccccaacccccgcgcgtccctgaaccacagcacggccttcaacccgcagccccagtcccagatgcaggacacccggcagatccagcccagcccgccctggagctacgaccagtcctaccagtacctgggcagcatcgcctcccccagcgtccaccccgccacccccatctccccggggcgcgccagcggcatgaccacgctctccgcggagctgagctcccgcctgagcaccgcccccgacctcaccgccttctccgacccccggcagttcccggccctgcccagcatctccgacccccgcatgcactaccccggggccttcacctacagcccgacgcccgtgacctccggcatcggcatcgggatgagcgcgatgggctccgccacccggtaccacacctacctgcccccgccctaccccgggagctcccaggcccagggcgggcccttccaggccagcagcccctcctaccacctctactacggcgcgagcgccggctcctaccagttcagcatggtcgggggcgagcgctccccgccccggatcctgccgccctgcacgaacgccagcaccgggtccgccctgctcaaccccagcctgcccaaccagtccgacgtggtggaggccgagggcagccactccaacagccccaccaacatggcgccctccgcccgcctggaggaggccgtgtggcggccgtactgatgatgaggactagtccctgttcccagagcccacttttttttctttttttgaaataaaatagcctgtctttcagatctcaaaggctcttttcagagccaccaaaaaaaaaaaaaaaaaaaaaaaaaaaaaaaaaaaaaaaaaaaaaaaaaaaaaaaaaaaaaaaaaaaaaaaaaaaaaaaaaaaaaaaaaaaaaaaaaaaaa

SEQ ID NO: 919 - RNA, 2114 nt, synthetic construct
  misc_feature 1..2114: note = Homo sapiens____CBFbeta(1-165)_SMMHC(1527-1972) mRNA opt1
  source 1..2114: mol_type = other RNA
aggagagtcccgcagtcggcgtccagcggctctgcttgttcgtgtgtgtgtcgttgcaggccttattcaagcttaccatgccccgcgtggtcccggaccagcggagcaagttcgagaacgaggagttcttccgcaagctgtcccgggagtgcgagatcaagtacaccggcttccgcgaccggccccacgaggagcgccaggcccggttccagaacgcctgccgcgacgggcggagcgagatcgcgttcgtggccaccggcacgaacctctccctgcagttcttccccgccagctggcagggggagcagcgccagaccccctcccgggagtacgtggacctggagcgcgaggccggcaaggtctacctcaaggccccgatgatcctgaacggggtgtgcgtgatctggaagggctggatcgacctgcagcggctcgacggcatggggtgcctggagttcgacgaggagcgcgcgcagcaggaggacgccctggcccagcaggccttcgaggaggcgcggcgccggacccgcgagttcgaggaccgggaccgcagccaccgggaggagatggaggtccacgagctcgagaagtccaagcgcgccctggagacccagatggaggagatgaagacgcagctggaggagctcgaggacgagctgcaggccaccgaggacgccaagctgcgcctcgaggtgaacatgcaggccctgaagggccagttcgagcgggacctgcaggcgcgcgacgagcagaacgaggagaagcggcgccagctccagcggcagctgcacgagtacgagaccgagctggaggacgagcgcaagcagcgggccctcgccgccgccgcgaagaagaagctggagggggacctgaaggacctcgagctgcaggccgacagcgccatcaagggccgcgaggaggccatcaagcagctgcggaagctccaggcccagatgaaggacttccagcgcgagctggaggacgcgcgggcctcccgcgacgagatcttcgccaccgccaaggagaacgagaagaaggccaagagcctggaggcggacctcatgcagctgcaggaggacctggccgccgccgagcgggcgcgcaagcaggccgacctcgagaaggaggagctggccgaggagctggcctccagcctctccgggcggaacgccctgcaggacgagaagcgccggctggaggcgcgcatcgcccagctcgaggaggagctggaggaggagcagggcaacatggaggccatgagcgaccgggtgcgcaaggccacgcagcaggccgagcagctgtccaacgagctcgcgaccgagcgcagcaccgcccagaagaacgagtccgcccggcagcagctggagcgccagaacaaggagctgcggagcaagctccacgagatggagggcgccgtcaagtccaagttcaagagcaccatcgccgcgctggaggccaagatcgcccagctggaggagcaggtcgagcaggaggcccgcgagaagcaggcggccaccaagagcctgaagcagaaggacaagaagctcaaggagatcctgctccaggtggaggacgagcggaagatggccgagcagtacaaggagcaggccgagaaggggaacgcccgcgtgaagcagctgaagcggcagctggaggaggcggaggaggagtcccagcgcatcaacgccaaccggcgcaagctgcagcgggagctcgacgaggccacggagagcaacgaggccatgggccgcgaggtgaacgccctgaagtccaagctgcggcgcgggaacgagaccagcttcgtgccctcccggcgcagcggcggccggcgcgtcatcgagaacgcggacgggtccgaggaggagaccgacacgcgggacgccgacttcaacggcaccaaggccagcgagtgatgatgaggactagtccctgttcccagagcccacttttttttctttttttgaaataaaatagcctgtctttcagatctcaaaggctcttttcagagccaccaaaaaaaaaaaaaaaaaaaaaaaaaaaaaaaaaaaaaaaaaaaaaaaaaaaaaaaaaaaaaaaaaaaaaaaaaaaaaaaaaaaaaaaaaaaaaaaaaaaaa

SEQ ID NO: 920 - RNA, 1829 nt, synthetic construct
  misc_feature 1..1829: note = Artificial____CBFbeta(1-165)_SMMHC(1527-1877) mRNA opt1
  source 1..1829: mol_type = other RNA
aggagagtcccgcagtcggcgtccagcggctctgcttgttcgtgtgtgtgtcgttgcaggccttattcaagcttaccatgccccgcgtggtgccggaccagcggagcaagttcgagaacgaggagttcttccgcaagctgtcccgggagtgcgagatcaagtacacgggcttccgcgaccggccccacgaggagcgccaggcccggttccagaacgcctgccgcgacgggcggagcgagatcgcgttcgtggccaccggcacgaacctgtccctgcagttcttccccgccagctggcagggggagcagcgccagaccccctcccgggagtacgtggacctggagcgcgaggccggcaaggtctacctcaaggccccgatgatcctgaacggggtgtgcgtgatctggaagggctggatcgacctgcagcggctcgacggcatggggtgcctggagttcgacgaggagcgcgcgcagcaggaggacgccctggcccagcaggccttcgaggaggcgcggcgccggacccgcgagttcgaggaccgggaccgcagccaccgggaggagatggaggtccacgagctcgagaagtccaagcgcgccctggagacccagatggaggagatgaagacgcagctggaggagctcgaggacgagctgcaggccaccgaggacgccaagctgcgcctcgaggtgaacatgcaggccctgaagggccagttcgagcgggacctgcaggcgcgcgacgagcagaacgaggagaagcggcgccagctccagcggcagctgcacgagtacgagaccgagctggaggacgagcgcaagcagcgggccctcgccgccgccgcgaagaagaagctggagggggacctgaaggacctcgagctgcaggccgacagcgccatcaagggccgcgaggaggccatcaagcagctgcggaagctccaggcccagatgaaggacttccagcgcgagctggaggacgcgcgggcctcccgcgacgagatcttcgccaccgccaaggagaacgagaagaaggccaagagcctggaggcggacctcatgcagctgcaggaggacctggccgccgccgagcgggcgcgcaagcaggccgacctcgagaaggaggagctggccgaggagctggcctccagcctctccgggcggaacgccctgcaggacgagaagcgccggctggaggcgcgcatcgcccagctcgaggaggagctggaggaggagcagggcaacatggaggccatgagcgaccgggtgcgcaaggccacgcagcaggccgagcagctgtccaacgagctcgcgaccgagcgcagcaccgcccagaagaacgagtccgcccggcagcagctggagcgccagaacaaggagctgcggagcaagctccacgagatggagggcgccgtcaagtccaagttcaagagcaccatcgccgcgctggaggccaagatcgcccagctggaggagcaggtcgagcaggaggcccgcgagaagcaggcggccaccaagagcctgaagcagaaggacaagaagctcaaggagatcctgctccaggtggaggacgagcggaagatggccgagcagtacaaggagcaggccgagaaggggaacgcctgatgatgaggactagtccctgttcccagagcccacttttttttctttttttgaaataaaatagcctgtctttcagatctcaaaggctcttttcagagccaccaaaaaaaaaaaaaaaaaaaaaaaaaaaaaaaaaaaaaaaaaaaaaaaaaaaaaaaaaaaaaaaaaaaaaaaaaaaaaaaaaaaaaaaaaaaaaaaaaaaaa

SEQ ID NO: 921 - RNA, 890 nt, synthetic construct
  misc_feature 1..890: note = Artificial____CBFbeta(1-165)_Linker_Lifeact mRNA opt1
  source 1..890: mol_type = other RNA
aggagagtcccgcagtcggcgtccagcggctctgcttgttcgtgtgtgtgtcgttgcaggccttattcaagcttaccatgccccgcgtggtccccgaccagcggagcaagttcgagaacgaggagttcttccgcaagctgtcccgggagtgcgagatcaagtacaccggcttccgcgaccggccccacgaggagcgccaggcccggttccagaacgcctgccgcgacgggcggagcgagatcgcgttcgtggccaccggcacgaacctctccctgcagttcttccccgccagctggcagggggagcagcgccagaccccctcccgggagtacgtggacctggagcgcgaggccggcaaggtctacctcaaggccccgatgatcctgaacggggtgtgcgtgatctggaagggctggatcgacctgcagcggctcgacggcatggggtgcctggagttcgacgaggagcgcgcgcagcaggaggacgccctggcccagcaggccttcgaggaggcgcggcgccggacccgcgagttcgaggaccgggaccgcagccaccgggaggagatggagggcgggtccggcgggagcggcggctccgggggcagcgggggcggcggggtcgccgacctcatcaagaagttcgagtccatcagcaaggaggagggcgacccgcccgtggccacctgatgatgaggactagtccctgttcccagagcccacttttttttctttttttgaaataaaatagcctgtctttcagatctcaaaggctcttttcagagccaccaaaaaaaaaaaaaaaaaaaaaaaaaaaaaaaaaaaaaaaaaaaaaaaaaaaaaaaaaaaaaaaaaaaaaaaaaaaaaaaaaaaaaaaaaaaaaaaaaaaaa

SEQ ID NO: 922 - RNA, 857 nt, synthetic construct
  misc_feature 1..857: note = Artificial____CBFbeta(1-165)_HIF1alpha(549-575) mRNA opt1
  source 1..857: mol_type = other RNA
aggagagtcccgcagtcggcgtccagcggctctgcttgttcgtgtgtgtgtcgttgcaggccttattcaagcttaccatgccccgcgtggtcccggaccagcggagcaagttcgagaacgaggagttcttccgcaagctgtcccgggagtgcgagatcaagtacaccggcttccgcgaccggccccacgaggagcgccaggcccggttccagaacgcctgccgcgacgggcggagcgagatcgcgttcgtggccaccggcacgaacctctccctgcagttcttccccgccagctggcagggggagcagcgccagaccccctcccgggagtacgtggacctggagcgcgaggccggcaaggtctacctcaaggccccgatgatcctgaacggggtgtgcgtgatctggaagggctggatcgacctgcagcggctcgacggcatggggtgcctggagttcgacgaggagcgcgcgcagcaggaggacgccctggcccagcaggccttcgaggaggcgcggcgccggacccgcgagttcgaggaccgggaccgcagccaccgggaggagatggagcccttctccacccaggacacggacctcgacctggagatgctggccccctacatccccatggacgacgacttccagctccgctgatgatgaggactagtccctgttcccagagcccacttttttttctttttttgaaataaaatagcctgtctttcagatctcaaaggctcttttcagagccaccaaaaaaaaaaaaaaaaaaaaaaaaaaaaaaaaaaaaaaaaaaaaaaaaaaaaaaaaaaaaaaaaaaaaaaaaaaaaaaaaaaaaaaaaaaaaaaaaaaaaa

SEQ ID NO: 923 - RNA, 902 nt, synthetic construct
  misc_feature 1..902: note Artificial____CBFbeta(1-165)_Linker_HIF1alpha(549-575) mRNA opt1
  source 1..902: mol_type = other RNA
aggagagtcccgcagtcggcgtccagcggctctgcttgttcgtgtgtgtgtcgttgcaggccttattcaagcttaccatgccccgcgtggtcccggaccagcggagcaagttcgagaacgaggagttcttccgcaagctgtcccgggagtgcgagatcaagtacaccggcttccgcgaccggccccacgaggagcgccaggcccggttccagaacgcctgccgcgacgggcggagcgagatcgcgttcgtggccaccggcacgaacctctccctgcagttcttccccgccagctggcagggggagcagcgccagaccccctcccgggagtacgtggacctggagcgcgaggccggcaaggtctacctcaaggccccgatgatcctgaacggggtgtgcgtgatctggaagggctggatcgacctgcagcggctcgacggcatggggtgcctggagttcgacgaggagcgcgcgcagcaggaggacgccctggcccagcaggccttcgaggaggcgcggcgccggacccgcgagttcgaggaccgggaccgcagccaccgggaggagatggagggcgggtccggcgggagcggcggctccgggggcagcgggggcggccccttctccacccaggacacggacctcgacctggagatgctggccccctacatccccatggacgacgacttccagctccgctgatgatgaggactagtccctgttcccagagcccacttttttttctttttttgaaataaaatagcctgtctttcagatctcaaaggctcttttcagagccaccaaaaaaaaaaaaaaaaaaaaaaaaaaaaaaaaaaaaaaaaaaaaaaaaaaaaaaaaaaaaaaaaaaaaaaaaaaaaaaaaaaaaaaaaaaaaaaaaaaaaa

SEQ ID NO: 924 - RNA, 2537 nt, synthetic construct
  misc_feature 1..2537: note = Artificial____RUNX1(1-177)_N_RUNX1T1a(31-604) mRNA opt1
  source 1..2537: mol_type = other RNA
aggagagtcccgcagtcggcgtccagcggctctgcttgttcgtgtgtgtgtcgttgcaggccttattcaagcttaccatgcgcatccccgtggacgccagcacctcccggcgcttcaccccgcccagcacggccctgtcccccggcaagatgagcgaggcgctccccctgggggccccggacgccggcgccgccctggcggggaagctccggtccggcgaccgcagcatggtcgaggtgctggccgaccaccccggggagctggtgcggaccgactcccccaacttcctctgcagcgtcctgcccacccactggcgctgcaacaagaccctgccgatcgccttcaaggtggtggccctcggcgacgtccccgacggcacgctggtgaccgtgatggcggggaacgacgagaactactccgccgagctgcggaacgccaccgccgccatgaagaaccaggtcgcgcgcttcaacgacctccggttcgtgggccgcagcgggcggggcaagtccttcaccctgacgatcaccgtgttcaccaaccccccccaggtcgccacctaccaccgcgccatcaagatcacggtggacgggccgcgggagccccgcaaccggaccgagaagcacagcaccatgcccgactcccccgtggacgtcaagacccagagccgcctgacgccgcccaccatgccccccccgcccaccacccagggcgccccccggacgtccagcttcacccccaccaccctcacgaacggcacctcccacagcccgaccgccctgaacggggcgccctccccccccaacggcttcagcaacgggccgagctccagctccagctccagcctggccaaccagcagctcccccccgcctgcggcgcccgccagctgtccaagctgaagcggttcctcaccacgctgcagcagttcggcaacgacatcagcccggagatcggggagcgcgtgcggaccctggtgctcggcctggtcaactccaccctgaccatcgaggagttccacagcaagctccaggaggccacgaacttccccctgcgccccttcgtgatccccttcctgaaggcgaacctcccgctgctgcagcgcgagctcctgcactgcgcccggctggccaagcagaaccccgcccagtacctcgcccagcacgagcagctgctgctcgacgcgtccaccaccagccccgtggactccagcgagctgctgctcgacgtcaacgagaacgggaagcgccggacccccgaccgcacgaaggagaacggcttcgaccgggagccgctgcactccgagcaccccagcaagcgcccctgcaccatctcccccgggcagcggtacagcccgaacaacggcctgtcctaccagcccaacggcctcccccaccccaccccgccccccccccagcactaccgcctggacgacatggccatcgcccaccactaccgggacagctaccgccacccgagccaccgggacctgcgcgaccggaaccgccccatggggctgcacggcacccggcaggaggagatgatcgaccaccgcctcaccgaccgggagtgggccgaggagtggaagcacctggaccacctgctcaactgcatcatggacatggtggagaagacgcgccggtccctgaccgtgctgcgccgctgccaggaggcggaccgggaggagctcaactactggatccgccggtacagcgacgccgaggacctgaagaaggggggcgggtccagctccagccactcccgccagcagagccccgtcaaccccgacccggtggccctggacgcccaccgggagttcctccaccgccccgcctccggctacgtccccgaggagatctggaagaaggcggaggaggccgtgaacgaggtgaagcggcaggccatgaccgagctgcagaaggccgtcagcgaggccgagcgcaaggcgcacgacatgatcaccacggagcgggccaagatggagcgcaccgtggccgaggccaagcggcaggccgcggaggacgccctggccgtgatcaaccagcaggaggactccagcgagtcctgctggaactgcggccgcaaggccagcgagacctgctccgggtgcaacaccgcgcggtactgcggcagcttctgccagcacaaggactgggagaagcaccaccacatctgcgggcagacgctccaggcccagcagcagggcgacaccccggccgtctccagcagcgtgacccccaactccggggccggcagccccatggacacccccccggccgcgacgccccgctccaccacccccggcacccccagcacgatcgagaccaccccgcggtgatgatgaggactagtccctgttcccagagcccacttttttttctttttttgaaataaaatagcctgtctttcagatctcaaaggctcttttcagagccaccaaaaaaaaaaaaaaaaaaaaaaaaaaaaaaaaaaaaaaaaaaaaaaaaaaaaaaaaaaaaaaaaaaaaaaaaaaaaaaaaaaaaaaaaaaaaaaaaaaaaa

SEQ ID NO: 925 - RNA, 1052 nt, synthetic construct
  misc_feature 1..1052: note = Artificial____RUNX1(1-241)_RUNX1T1b(short) mRNA opt1
  source 1..1052: mol_type = other RNA
aggagagtcccgcagtcggcgtccagcggctctgcttgttcgtgtgtgtgtcgttgcaggccttattcaagcttaccatgcgcatccccgtggacgccagcacctcccggcgcttcaccccgcccagcacggccctgtcccccggcaagatgagcgaggcgctccccctgggggccccggacgccggcgccgccctggcggggaagctccggtccggcgaccgcagcatggtcgaggtgctggccgaccaccccggggagctggtgcggaccgactcccccaacttcctctgcagcgtcctgcccacccactggcgctgcaacaagaccctgccgatcgccttcaaggtggtggccctcggcgacgtccccgacggcacgctggtgaccgtgatggcggggaacgacgagaactactccgccgagctgcggaacgccaccgccgccatgaagaaccaggtcgcgcgcttcaacgacctccggttcgtgggccgcagcgggcggggcaagtccttcaccctgacgatcaccgtgttcaccaacccgccccaggtcgccacctaccaccgcgccatcaagatcacggtggacgggccccgggagccccgccggcaccgccagaagctggacgaccagaccaagcccggcagcctctccttcagcgagcggctgtccgagctggagcagctccgccggaccgccatgcgcgtgagcccccaccacccggcccccacccccaacccccgggcgtccctgaaccacagcacggccttcaacccgcagccccagtcccagatgcaggaggtcggcttctgccacgtggcccaggtggggctgaagctcctgggctgatgatgaggactagtccctgttcccagagcccacttttttttctttttttgaaataaaatagcctgtctttcagatctcaaaggctcttttcagagccaccaaaaaaaaaaaaaaaaaaaaaaaaaaaaaaaaaaaaaaaaaaaaaaaaaaaaaaaaaaaaaaaaaaaaaaaaaaaaaaaaaaaaaaaaaaaaaaaaaaaaa

SEQ ID NO: 926 - RNA, 2756 nt, synthetic construct
  misc_feature 1..2756: note = Artificial____RUNX1(1-241)_V_RUNX1T1b(22-604) mRNA opt1
  source 1..2756: mol_type = other RNA
aggagagtcccgcagtcggcgtccagcggctctgcttgttcgtgtgtgtgtcgttgcaggccttattcaagcttaccatgcgcatccccgtggacgccagcacctcccggcgcttcaccccgcccagcacggccctgtcccccggcaagatgagcgaggcgctccccctgggggccccggacgccggcgccgccctggcggggaagctccggtccggcgaccgcagcatggtcgaggtgctggccgaccaccccggggagctggtgcggaccgactcccccaacttcctctgcagcgtcctgcccacccactggcgctgcaacaagaccctgccgatcgccttcaaggtggtggccctcggcgacgtccccgacggcacgctggtgaccgtgatggcggggaacgacgagaactactccgccgagctgcggaacgccaccgccgccatgaagaaccaggtcgcgcgcttcaacgacctccggttcgtgggccgcagcgggcggggcaagtccttcaccctgacgatcaccgtgttcaccaacccgccccaggtcgccacctaccaccgcgccatcaagatcacggtggacgggccccgggagccccgccggcaccgccagaagctggacgaccagaccaagcccggcagcctctccttcagcgagcggctgtccgagctggagcagctccgccggaccgccatgcgcgtgagcccccaccacccggcccccacccccaacccccgggcgtccctgaaccacagcacggccttcaacccgcagccccagtcccagatgcaggtcggccccgagaagcgcgtgcccgccatgccggggagccccgtggaggtcaagatccagagccgctccagcccgcccaccatgccgcccctgcccccgatcaaccccggcgggccccggcccgtgtccttcacccccaccgccctcagcaacggcatcaaccactccccgcccacgctgaacggcgcccccagcccgccccagcgcttctccaacgggcccgcgagctccaccagctccgccctgaccaaccagcagctccccgcgacctgcggcgcccggcagctgagcaagctgaagcgcttcctcacgaccctgcagcagttcgggaacgacatctcccccgagatcggcgagaaggtgcggaccctggtcctcgccctggtgaacagcaccgtgacgatcgaggagttccactgcaagctgcaggaggccaccaacttccccctccgccccttcgtcatccccttcctgaaggccaacctgccgctcctgcagcgggagctgctccactgcgcccgcgccgcgaagcagaccccctcccagtacctggcccagcacgagcacctcctgctgaacaccagcatcgcctcccccgccgacagctccgagctgctcatggaggtgcacgggaacggcaagcggcccagcccggagcgccgggaggagaacagcttcgaccgcgacacgatcgcccccgagccgcccgcgaagcgggtctgcaccatctcccccgcgccccgccacagccccgccctgaccgtgccgctgatgaaccccggcgggcagttccaccccacgcccccgcccctgcagcactacaccctcgaggacatcgccacctcccacctgtaccgggagcccaacaagatgctggagcaccgcgaggtgcgggaccgccaccacagcctcggcctgaacgggggctaccaggacgagctggtcgaccaccggctcaccgagcgcgagtgggccgacgagtggaagcacctggaccacgccctgaactgcatcatggagatggtggagaagacccgccggtccatggccgtgctccgccggtgccaggagagcgaccgcgaggagctgaactactggaagcggcgctacaacgagaacaccgagctgcggaagacggggaccgagctcgtctcccgccagcacagccccggctccgccgacagcctgtccaacgacagccagcgggagttcaactcccgcccgggcaccgggtacgtgcccgtggagttctggaagaagaccgaggaggccgtcaacaaggtgaagatccaggccatgagcgaggtgcagaaggcggtcgccgaggccgagcagaaggccttcgaggtgatcgcgacggagcgggcccgcatggagcagaccatcgccgacgtgaagcggcaggccgccgaggacgcgttcctggtcatcaacgagcaggaggagtccaccgagaactgctggaactgcggccgcaaggccagcgagacctgctccgggtgcaacatcgcccggtactgcggcagcttctgccagcacaaggactgggagcgccaccaccggctctgcgggcagaacctgcacggccagagcccccacggccaggggcgccccctgctcccggtgggccgggggtccagcgcccgctccgccgactgcagcgtgccctcccccgcgctggacaagacgagcgccaccacctcccggagctccacccccgccagcgtcacggccatcgacaccaacggcctgtgatgatgaggactagtccctgttcccagagcccacttttttttctttttttgaaataaaatagcctgtctttcagatctcaaaggctcttttcagagccaccaaaaaaaaaaaaaaaaaaaaaaaaaaaaaaaaaaaaaaaaaaaaaaaaaaaaaaaaaaaaaaaaaaaaaaaaaaaaaaaaaaaaaaaaaaaaaaaaaaaaa

SEQ ID NO: 927 - RNA, 2756 nt, synthetic construct
  misc_feature 1..2756: note = Artificial____RUNX1(1-241)_I_RUNX1T1b(22-604) mRNA opt1
  source 1..2756: mol_type = other RNA
aggagagtcccgcagtcggcgtccagcggctctgcttgttcgtgtgtgtgtcgttgcaggccttattcaagcttaccatgcgcatccccgtggacgccagcacctcccggcgcttcaccccgcccagcacggccctgtcccccggcaagatgagcgaggcgctccccctgggggccccggacgccggcgccgccctggcggggaagctccggtccggcgaccgcagcatggtcgaggtgctggccgaccaccccggggagctggtgcggaccgactcccccaacttcctctgcagcgtcctgcccacccactggcgctgcaacaagaccctgccgatcgccttcaaggtggtggccctcggcgacgtccccgacggcacgctggtgaccgtgatggcggggaacgacgagaactactccgccgagctgcggaacgccaccgccgccatgaagaaccaggtcgcgcgcttcaacgacctccggttcgtgggccgcagcgggcggggcaagtccttcaccctgacgatcaccgtgttcaccaacccgccccaggtcgccacctaccaccgcgccatcaagatcacggtggacgggccccgggagccccgccggcaccgccagaagctggacgaccagaccaagcccggcagcctctccttcagcgagcggctgtccgagctggagcagctccgccggaccgccatgcgcgtgagcccccaccacccggcccccacccccaacccccgggcgtccctgaaccacagcacggccttcaacccgcagccccagtcccagatgcagatcggccccgagaagcgcgtccccgccatgccggggagccccgtggaggtgaagatccagagccgctccagcccgcccaccatgccgcccctgcccccgatcaaccccggcgggccccggcccgtctccttcacccccaccgccctcagcaacggcatcaaccactccccgcccacgctgaacggcgcccccagcccgccccagcgcttctccaacgggcccgcgagctccaccagctccgccctgaccaaccagcagctccccgcgacctgcggcgcccggcagctgagcaagctgaagcgcttcctcacgaccctgcagcagttcgggaacgacatctcccccgagatcggcgagaaggtgcggaccctggtgctcgccctggtcaacagcaccgtgacgatcgaggagttccactgcaagctgcaggaggccaccaacttccccctccgccccttcgtgatccccttcctgaaggccaacctgccgctcctgcagcgggagctgctccactgcgcccgcgccgcgaagcagaccccctcccagtacctggcccagcacgagcacctcctgctgaacaccagcatcgcctcccccgccgacagctccgagctgctcatggaggtccacgggaacggcaagcggcccagcccggagcgccgggaggagaacagcttcgaccgcgacacgatcgcccccgagccgcccgcgaagcgggtgtgcaccatctcccccgcgccccgccacagccccgccctgaccgtcccgctgatgaaccccggcgggcagttccaccccacgcccccgcccctgcagcactacaccctcgaggacatcgccacctcccacctgtaccgggagcccaacaagatgctggagcaccgcgaggtgcgggaccgccaccacagcctcggcctgaacgggggctaccaggacgagctggtggaccaccggctcaccgagcgcgagtgggccgacgagtggaagcacctggaccacgccctgaactgcatcatggagatggtcgagaagacccgccggtccatggccgtgctccgccggtgccaggagagcgaccgcgaggagctgaactactggaagcggcgctacaacgagaacaccgagctgcggaagacggggaccgagctcgtgtcccgccagcacagccccggctccgccgacagcctgtccaacgacagccagcgggagttcaactcccgcccgggcaccgggtacgtccccgtggagttctggaagaagaccgaggaggccgtgaacaaggtcaagatccaggccatgagcgaggtgcagaaggcggtggccgaggccgagcagaaggccttcgaggtcatcgcgacggagcgggcccgcatggagcagaccatcgccgacgtgaagcggcaggccgccgaggacgcgttcctggtgatcaacgagcaggaggagtccaccgagaactgctggaactgcggccgcaaggccagcgagacctgctccgggtgcaacatcgcccggtactgcggcagcttctgccagcacaaggactgggagcgccaccaccggctctgcgggcagaacctgcacggccagagcccccacggccaggggcgccccctgctcccggtcggccgggggtccagcgcccgctccgccgactgcagcgtgccctcccccgcgctggacaagacgagcgccaccacctcccggagctccacccccgccagcgtgacggccatcgacaccaacggcctgtgatgatgaggactagtccctgttcccagagcccacttttttttctttttttgaaataaaatagcctgtctttcagatctcaaaggctcttttcagagccaccaaaaaaaaaaaaaaaaaaaaaaaaaaaaaaaaaaaaaaaaaaaaaaaaaaaaaaaaaaaaaaaaaaaaaaaaaaaaaaaaaaaaaaaaaaaaaaaaaaaaa

SEQ ID NO: 928 - RNA, 1640 nt, synthetic construct
  misc_feature 1..1640: note = Homo sapiens__Q01196-1__RUNX1(K83E_R174Q) mRNA opt3
  source 1..1640: mol_type = other RNA
aggagagtcccgcagtcggcgtccagcggctctgcttgttcgtgtgtgtgtcgttgcaggccttattcaagcttaccatgagaatccccgtggatgccagcaccagcagaagattcacccctcctagcaccgctctgagccctggcaagatgtctgaagctctgcctctgggagcacctgatgctggtgcagctctggccggaaaactgagaagcggcgacagatccatggtggaagtgctggctgatcaccccggcgaacttgtgcggacagacagccctaatttcctgtgcagcgtgctgcctacacactggcggtgcaatgagacactgcctatcgccttcaaggtggtggccctgggagatgtgcctgatggcacactggttacagtgatggccggcaacgacgagaactacagcgccgagctgagaaatgccaccgccgccatgaagaaccaggtggccagattcaacgacctgagattcgtgggcagaagcggcaggggcaagagctttaccctgaccatcaccgtgttcaccaatcctccacaggtggcaacctaccaccgggccatcaagatcacagtggacggccctcaagagcccagacggcacagacagaaactggacgaccagaccaagcctggcagcctgagctttagcgagagactgagcgagctggaacagctgagaagaaccgccatgcgggtgtccccacatcaccctgctcctacacctaatcctcgggccagcctgaatcacagcaccgcctttaatccccagcctcagagccagatgcaggacaccagacagattcagccttctccaccttggagctacgaccagagctaccagtacctgggctctatcgcctctcctagcgtgcaccctgccacacctattagtcctggcagagccagcggcatgacaacactgtctgccgagctgtccagcagactgagcacagcccctgatctgaccgccttcagcgaccctagacagttccctgctctgcccagcatctctgaccccagaatgcattaccctggcgccttcacatacagccccacacctgtgacaagcggcatcggcattggcatgtctgccatgggaagcgccaccagataccacacctacctgcctccaccttatcctggcagctctcaggctcaaggcggcccttttcaggccagctctccttcctaccacctgtactatggcgccagcgccggctcctaccagttttctatggttggaggcgagcggagccctcctagaatcctgcctccttgtaccaacgccagcacaggatctgccctgctgaatcccagcctgcctaatcagagcgacgtggtggaagccgagggcagccatagcaacagccctaccaatatggcccctagcgccagactggaagaggccgtttggaggccttactgatgatgaggactagtccctgttcccagagcccacttttttttctttttttgaaataaaatagcctgtctttcagatctcaaaggctcttttcagagccaccaaaaaaaaaaaaaaaaaaaaaaaaaaaaaaaaaaaaaaaaaaaaaaaaaaaaaaaaaaaaaaaaaaaaaaaaaaaaaaaaaaaaaaaaaaaaaaaaaaaaa

SEQ ID NO: 929 - RNA, 2114 nt, synthetic construct
  misc_feature 1..2114: note = Homo sapiens____CBFbeta(1-165)_SMMHC(1527-1972) mRNA opt3
  source 1..2114: mol_type = other RNA
aggagagtcccgcagtcggcgtccagcggctctgcttgttcgtgtgtgtgtcgttgcaggccttattcaagcttaccatgcctagagtggtgcccgaccagagaagcaagttcgagaacgaagagttctttcggaagctgagcagagagtgcgagatcaagtacaccggcttccgggacagaccccacgaagaaagacaggccagattccagaacgcctgcagagatggcagatccgagatcgcctttgtggccaccggcaccaatctgagcctgcagttctttccagcctcctggcagggcgagcagagacaaacacccagcagagaatacgtggacctggaacgcgaggccggcaaggtgtacctgaaggcccctatgatcctgaacggcgtgtgcgtgatctggaaaggctggatcgatctgcagcggctggatggcatgggctgcctggaatttgacgaggaaagagcccagcaagaggacgcccttgctcagcaggcctttgaggaagccagaaggcggaccagagagttcgaggacagagacagatcccaccgggaagagatggaagtgcacgagctggaaaagagcaagagagccctggaaacccagatggaagaaatgaagacccagctcgaggaactcgaggacgagctgcaggccacagaggatgccaagctgagactggaagtgaacatgcaggccctgaagggccagttcgagagagatctgcaggctagggacgagcagaacgaggaaaagcggagacagctgcagaggcagctgcacgagtacgagacagagctggaagatgagcggaagcagagagcactggccgctgccgccaagaagaaactggaaggcgacctgaaggatctggaactccaggccgacagcgccatcaagggaagagaagaggccatcaagcagctgcggaagctgcaagcccagatgaaggacttccagcgcgagttggaagatgccagagccagcagggatgagatcttcgccaccgccaaagagaacgagaagaaggccaagagcctggaagccgatctgatgcagctccaagaggatctggctgccgccgagagagccagaaaacaggccgacctggaaaaagaggaactggccgaagaactggccagcagcctgtctggcagaaacgctctgcaggacgagaagagaaggctggaagccaggatcgcccagttggaggaagaactcgaagaggaacagggcaacatggaagccatgagcgacagagtgcggaaggccacacagcaggctgagcagctgagcaatgagctggccaccgagagaagcacagcccagaagaatgagagcgccaggcagcagctcgagcggcagaacaaagagctgagaagcaaactgcacgaaatggaaggggccgtgaagtccaagttcaagagcacaatcgccgctctcgaggccaagatcgctcagctcgaagaacaggtggaacaagaggcccgggaaaagcaggccgccacaaagtctctgaagcagaaggacaagaagctgaaagaaatcctgctgcaggtcgaggatgagagaaagatggccgagcagtacaaagaacaggctgagaagggcaacgccagagtgaagcagctgaaacggcaactggaagaggccgaggaagagtcccagagaatcaacgccaacagacggaaactgcagagagagctggacgaagccaccgagtccaatgaggccatgggcagagaagtgaacgccctgaagtctaagctgcggagaggcaacgaaaccagcttcgtgcccagcagaagatccggcggcagaagagtgatcgagaacgccgatggctctgaggaagaaaccgacaccagagatgccgacttcaacggcacaaaggccagcgagtaatgatgaggactagtccctgttcccagagcccacttttttttctttttttgaaataaaatagcctgtctttcagatctcaaaggctcttttcagagccaccaaaaaaaaaaaaaaaaaaaaaaaaaaaaaaaaaaaaaaaaaaaaaaaaaaaaaaaaaaaaaaaaaaaaaaaaaaaaaaaaaaaaaaaaaaaaaaaaaaaaa

SEQ ID NO: 930 - RNA, 1829 nt, synthetic construct
  misc_feature 1..1829: note = Artificial____CBFbeta(1-165)_SMMHC(1527-1877) mRNA opt3
  source 1..1829: mol_type = other RNA
aggagagtcccgcagtcggcgtccagcggctctgcttgttcgtgtgtgtgtcgttgcaggccttattcaagcttaccatgcctagagtggtgcccgaccagagaagcaagttcgagaacgaagagttctttcggaagctgagcagagagtgcgagatcaagtacaccggcttccgggacagaccccacgaagaaagacaggccagattccagaacgcctgcagagatggcagatccgagatcgcctttgtggccaccggcaccaatctgagcctgcagttctttccagcctcctggcagggcgagcagagacaaacacccagcagagaatacgtggacctggaacgcgaggccggcaaggtgtacctgaaggcccctatgatcctgaacggcgtgtgcgtgatctggaaaggctggatcgatctgcagcggctggatggcatgggctgcctggaatttgacgaggaaagagcccagcaagaggacgcccttgctcagcaggcctttgaggaagccagaaggcggaccagagagttcgaggacagagacagatcccaccgggaagagatggaagtgcacgagctggaaaagagcaagagagccctggaaacccagatggaagaaatgaagacccagctcgaggaactcgaggacgagctgcaggccacagaggatgccaagctgagactggaagtgaacatgcaggccctgaagggccagttcgagagagatctgcaggctagggacgagcagaacgaggaaaagcggagacagctgcagaggcagctgcacgagtacgagacagagctggaagatgagcggaagcagagagcactggccgctgccgccaagaagaaactggaaggcgacctgaaggatctggaactccaggccgacagcgccatcaagggaagagaagaggccatcaagcagctgcggaagctgcaagcccagatgaaggacttccagcgcgagttggaagatgccagagccagcagggatgagatcttcgccaccgccaaagagaacgagaagaaggccaagagcctggaagccgatctgatgcagctccaagaggatctggctgccgccgagagagccagaaaacaggccgacctggaaaaagaggaactggccgaagaactggccagcagcctgtctggcagaaacgctctgcaggacgagaagagaaggctggaagccaggatcgcccagttggaggaagaactcgaagaggaacagggcaacatggaagccatgagcgacagagtgcggaaggccacacagcaggctgagcagctgagcaatgagctggccaccgagagaagcacagcccagaagaatgagagcgccaggcagcagctcgagcggcagaacaaagagctgagaagcaaactgcacgaaatggaaggggccgtgaagtccaagttcaagagcacaatcgccgctctcgaggccaagatcgctcagctcgaagaacaggtggaacaagaggcccgggaaaagcaggccgccacaaagtctctgaagcagaaggacaagaagctgaaagaaatcctgctgcaggtcgaggatgagagaaagatggccgagcagtacaaagaacaggctgagaagggcaacgcctgatgatgaggactagtccctgttcccagagcccacttttttttctttttttgaaataaaatagcctgtctttcagatctcaaaggctcttttcagagccaccaaaaaaaaaaaaaaaaaaaaaaaaaaaaaaaaaaaaaaaaaaaaaaaaaaaaaaaaaaaaaaaaaaaaaaaaaaaaaaaaaaaaaaaaaaaaaaaaaaaaa

SEQ ID NO: 931 - RNA, 890 nt, synthetic construct
  misc_feature 1..890: note = Artificial____CBFbeta(1-165)_Linker_Lifeact mRNA opt3
  source 1..890: mol_type = other RNA
aggagagtcccgcagtcggcgtccagcggctctgcttgttcgtgtgtgtgtcgttgcaggccttattcaagcttaccatgcctagagtggtgcccgaccagagaagcaagttcgagaacgaagagttctttcggaagctgagcagagagtgcgagatcaagtacaccggcttccgggacagaccccacgaagaaagacaggccagattccagaacgcctgcagagatggcagatccgagatcgcctttgtggccaccggcaccaatctgagcctgcagttctttccagcctcctggcagggcgagcagagacaaacacccagcagagaatacgtggacctggaacgcgaggccggcaaggtgtacctgaaggcccctatgatcctgaacggcgtgtgcgtgatctggaaaggctggatcgatctgcagcggctggatggcatgggctgcctggaatttgacgaggaaagagcccagcaagaggacgcccttgctcagcaggcctttgaggaagccagaaggcggaccagagagttcgaggacagagacagatcccaccgggaagagatggaaggcggatctggtggaagcggaggtagcggaggatcaggcggaggcggagttgccgatctgatcaagaagttcgagtccatcagcaaagaagagggcgaccctccagtggccacatgatgatgaggactagtccctgttcccagagcccacttttttttctttttttgaaataaaatagcctgtctttcagatctcaaaggctcttttcagagccaccaaaaaaaaaaaaaaaaaaaaaaaaaaaaaaaaaaaaaaaaaaaaaaaaaaaaaaaaaaaaaaaaaaaaaaaaaaaaaaaaaaaaaaaaaaaaaaaaaaaaa

SEQ ID NO: 932 - RNA, 857 nt, synthetic construct
  misc_feature 1..857: note = Artificial____CBFbeta(1-165)_HIF1alpha(549-575) mRNA opt3
  source 1..857: mol_type = other RNA
aggagagtcccgcagtcggcgtccagcggctctgcttgttcgtgtgtgtgtcgttgcaggccttattcaagcttaccatgcctagagtggtgcccgaccagagaagcaagttcgagaacgaagagttctttcggaagctgagcagagagtgcgagatcaagtacaccggcttccgggacagaccccacgaagaaagacaggccagattccagaacgcctgcagagatggcagatccgagatcgcctttgtggccaccggcaccaatctgagcctgcagttctttccagcctcctggcagggcgagcagagacaaacacccagcagagaatacgtggacctggaacgcgaggccggcaaggtgtacctgaaggcccctatgatcctgaacggcgtgtgcgtgatctggaaaggctggatcgatctgcagcggctggatggcatgggctgcctggaatttgacgaggaaagagcccagcaagaggacgcccttgctcagcaggcctttgaggaagccagaaggcggaccagagagttcgaggacagagacagatcccaccgggaagagatggaacccttcagcacccaagacaccgacctggacctcgaaatgctggccccttacatccccatggacgacgacttccagctgcggtaatgatgaggactagtccctgttcccagagcccacttttttttctttttttgaaataaaatagcctgtctttcagatctcaaaggctcttttcagagccaccaaaaaaaaaaaaaaaaaaaaaaaaaaaaaaaaaaaaaaaaaaaaaaaaaaaaaaaaaaaaaaaaaaaaaaaaaaaaaaaaaaaaaaaaaaaaaaaaaaaaa

SEQ ID NO: 933 - RNA, 902 nt, synthetic construct
  misc_feature 1..902: note Artificial____CBFbeta(1-165)_Linker_HIF1alpha(549-575) mRNA opt3
  source 1..902: mol_type = other RNA
aggagagtcccgcagtcggcgtccagcggctctgcttgttcgtgtgtgtgtcgttgcaggccttattcaagcttaccatgcctagagtggtgcccgaccagagaagcaagttcgagaacgaagagttctttcggaagctgagcagagagtgcgagatcaagtacaccggcttccgggacagaccccacgaagaaagacaggccagattccagaacgcctgcagagatggcagatccgagatcgcctttgtggccaccggcaccaatctgagcctgcagttctttccagcctcctggcagggcgagcagagacaaacacccagcagagaatacgtggacctggaacgcgaggccggcaaggtgtacctgaaggcccctatgatcctgaacggcgtgtgcgtgatctggaaaggctggatcgatctgcagcggctggatggcatgggctgcctggaatttgacgaggaaagagcccagcaagaggacgcccttgctcagcaggcctttgaggaagccagaaggcggaccagagagttcgaggacagagacagatcccaccgggaagagatggaaggcggatctggtggaagcggaggtagcggaggatctggcggaggacctttcagcacccaagacaccgacctggacctcgaaatgctggccccttacatccccatggacgacgacttccagctgcggtaatgatgaggactagtccctgttcccagagcccacttttttttctttttttgaaataaaatagcctgtctttcagatctcaaaggctcttttcagagccaccaaaaaaaaaaaaaaaaaaaaaaaaaaaaaaaaaaaaaaaaaaaaaaaaaaaaaaaaaaaaaaaaaaaaaaaaaaaaaaaaaaaaaaaaaaaaaaaaaaaaa

SEQ ID NO: 934 - RNA, 2537 nt, synthetic construct
  misc_feature 1..2537: note = Artificial____RUNX1(1-177)_N_RUNX1T1a(31-604) mRNA opt3
  source 1..2537: mol_type = other RNA
aggagagtcccgcagtcggcgtccagcggctctgcttgttcgtgtgtgtgtcgttgcaggccttattcaagcttaccatgagaatccccgtggatgccagcaccagcagaagattcacccctcctagcaccgctctgagccctggcaagatgtctgaagctctgcctctgggagcacctgatgctggtgcagctctggccggaaaactgagaagcggcgacagatccatggtggaagtgctggctgatcaccccggcgaacttgtgcggacagacagccctaatttcctgtgcagcgtgctgcctacacactggcggtgcaacaagacactgcctatcgccttcaaggtggtggctctgggagatgtgcctgatggcacactggtcacagtgatggccggcaacgacgagaattacagcgccgagctgagaaatgccaccgccgccatgaagaaccaggtggccagattcaacgacctgagattcgtgggcagaagcggcaggggcaagagctttaccctgaccatcaccgtgttcaccaatcctccacaggtggcaacctaccaccgggccatcaagatcaccgtggatggccctagagagccccggaacagaacagagaagcacagcaccatgcctgacagccccgtggacgtgaaaacccagagcagactgacccctccaaccatgcctcctccacctacaacacagggcgctcctagaaccagcagcttcacccctaccacactgaccaacggcacctctcacagccccacagctcttaatggcgccccttctccacctaacggcttcagcaatggcccaagcagcagcagctctagcagcctggctaatcagcagctgcctcctgcttgtggcgctagacagctgagcaagctgaagcggttcctgaccacactgcagcagttcggcaacgatatcagccccgagatcggcgagcgcgtcagaacactggttctgggcctcgtgaatagcaccctgacaatcgaagagttccacagcaagctgcaagaggccaccaactttccgctgcggcctttcgtgatcccattcctgaaggccaacctgcctctgctgcagagagaactgctccactgcgccagactggccaagcagaaccctgctcagtatctggcccagcacgagcaactgctgctggacgcctctacaacaagccctgtggatagcagcgagctgctcctggatgtgaacgagaacggcaagcggagaacccctgaccggaccaaagagaacggcttcgacagagagcctctgcacagcgagcaccccagcaaaagaccctgcacaatcagccctggccagcggtactctcccaacaacggcctgagctaccagcctaacggactgccccatcctacacctccacctccacagcactaccggctggacgatatggctatcgcccaccactaccgggacagctacagacaccctagccaccgggacctgcgggacagaaatagacctatgggcctgcacggcacccggcaagaggaaatgattgaccaccggctgaccgacagagaatgggccgaagagtggaagcacctggaccatctgctgaactgcatcatggatatggtggaaaagacccggcggagcctgaccgtgctgagaagatgtcaagaggccgatagagaggaactgaactactggatccggcggtacagcgacgccgaggatcttaagaaaggcggcggatctagcagcagccacagcagacagcagagccccgtgaatcctgatcctgtggcactggatgcccacagagaatttctgcacagacccgccagcggctacgtgccagaggaaatctggaagaaagccgaagaggccgtgaacgaagtgaagagacaggccatgaccgaactgcagaaagccgtgtctgaggccgagagaaaggcccacgatatgatcacaaccgagcgggccaagatggaaagaacagtggccgaggccaaaagacaggccgccgaagatgctctggctgtgatcaatcagcaagaggacagcagcgagtcctgctggaactgtggcagaaaggccagcgagacatgcagcggctgtaacaccgccagatattgcggcagcttctgccagcacaaggactgggagaagcaccaccacatctgcggccagacactgcaggctcagcagcaaggcgatactcctgccgtgtctagcagcgtgacccctaattctggcgccggatctcccatggatacccctccagctgccacacctagaagcacaacccctggcacacccagcaccatcgagacaacccctagatgatgatgaggactagtccctgttcccagagcccacttttttttctttttttgaaataaaatagcctgtctttcagatctcaaaggctcttttcagagccaccaaaaaaaaaaaaaaaaaaaaaaaaaaaaaaaaaaaaaaaaaaaaaaaaaaaaaaaaaaaaaaaaaaaaaaaaaaaaaaaaaaaaaaaaaaaaaaaaaaaaa

SEQ ID NO: 935 - RNA, 1052 nt, synthetic construct
  misc_feature 1..1052: note = Artificial____RUNX1(1-241)_RUNX1T1b(short) mRNA opt3
  source 1..1052: mol_type = other RNA
aggagagtcccgcagtcggcgtccagcggctctgcttgttcgtgtgtgtgtcgttgcaggccttattcaagcttaccatgagaatccccgtggatgccagcaccagcagaagattcacccctcctagcaccgctctgagccctggcaagatgtctgaagctctgcctctgggagcacctgatgctggtgcagctctggccggaaaactgagaagcggcgacagatccatggtggaagtgctggctgatcaccccggcgaacttgtgcggacagacagccctaatttcctgtgcagcgtgctgcctacacactggcggtgcaacaagacactgcctatcgccttcaaggtggtggctctgggagatgtgcctgatggcacactggtcacagtgatggccggcaacgacgagaattacagcgccgagctgagaaatgccaccgccgccatgaagaaccaggtggccagattcaacgacctgagattcgtgggcagaagcggcaggggcaagagctttaccctgaccatcaccgtgttcaccaatcctccacaggtggcaacctaccaccgggccatcaagatcaccgtggatggccctagagagcccagacggcacagacagaaactggacgaccagaccaagcctggcagcctgagctttagcgagagactgagcgagctggaacagctgagaagaaccgccatgcgggtgtccccacatcaccctgctcctacacctaatcctcgggccagcctgaatcacagcaccgcctttaatccccagcctcagagccagatgcaagaagtgggcttctgtcacgtggcccaagtgggactgaagctgctgggataatgatgaggactagtccctgttcccagagcccacttttttttctttttttgaaataaaatagcctgtctttcagatctcaaaggctcttttcagagccaccaaaaaaaaaaaaaaaaaaaaaaaaaaaaaaaaaaaaaaaaaaaaaaaaaaaaaaaaaaaaaaaaaaaaaaaaaaaaaaaaaaaaaaaaaaaaaaaaaaaaa

SEQ ID NO: 936 - RNA, 2756 nt, synthetic construct
  misc_feature 1..2756: note = Artificial____RUNX1(1-241)_V_RUNX1T1b(22-604) mRNA opt3
  source 1..2756: mol_type = other RNA
aggagagtcccgcagtcggcgtccagcggctctgcttgttcgtgtgtgtgtcgttgcaggccttattcaagcttaccatgagaatccccgtggatgccagcaccagcagaagattcacccctcctagcaccgctctgagccctggcaagatgtctgaagctctgcctctgggagcacctgatgctggtgcagctctggccggaaaactgagaagcggcgacagatccatggtggaagtgctggctgatcaccccggcgaacttgtgcggacagacagccctaatttcctgtgcagcgtgctgcctacacactggcggtgcaacaagacactgcctatcgccttcaaggtggtggctctgggagatgtgcctgatggcacactggtcacagtgatggccggcaacgacgagaattacagcgccgagctgagaaatgccaccgccgccatgaagaaccaggtggccagattcaacgacctgagattcgtgggcagaagcggcaggggcaagagctttaccctgaccatcaccgtgttcaccaatcctccacaggtggcaacctaccaccgggccatcaagatcaccgtggatggccctagagagcccagacggcacagacagaaactggacgaccagaccaagcctggcagcctgagctttagcgagagactgagcgagctggaacagctgagaagaaccgccatgcgggtgtccccacatcaccctgctcctacacctaatcctcgggccagcctgaatcacagcaccgcctttaatccccagcctcagagccagatgcaagtgggccctgagaaaagggtgccagccatgcctggaagccccgtggaagtgaagatccagagcagatctagccctcctaccatgcctcctctgcctccaatcaatcctggcggccctagacctgtgtccttcacacctaccgctctgtccaacggcatcaatcacagccctccaacactgaatggcgccccatctccacctcagcggttttctaatggccctgccagcagcacaagcagcgccctgacaaatcagcagctgcctgctacatgtggcgccagacagctgagcaagctgaagcggtttctgaccacactgcagcagttcggcaacgatatcagccccgagatcggcgagaaagtgcggacactggttctggccctggtcaacagcaccgtgaccatcgaagagttccactgcaagctgcaagaggccaccaactttccgctgcggcctttcgtgatcccattcctgaaggccaacctgcctctgctgcagagagagctgctgcattgcgccagagccgccaagcagacaccttctcagtatctggcccagcacgagcatctgctgctgaacacctctatcgcctctccagccgatagcagcgagctgctcatggaagtgcacggcaacggaaagaggccctctccagagcggagagaggaaaacagcttcgaccgggacacaatcgcccctgagcctccagccaagagagtgtgcacaatcagcccagctcctagacacagccccgctctgacagtgccccttatgaaccctggcggacagtttcaccccacacctccaccactccagcactacaccctggaagatatcgccaccagccacctgtaccgcgagcctaacaagatgctggaacaccgggaagtgcgcgacaggcaccattctctgggactgaacggcggctaccaggacgaactggtggatcacagactgaccgagcgcgagtgggccgatgaatggaaacacctggatcacgccctgaactgcatcatggaaatggtggaaaagacccggcggagcatggccgtcctgagaagatgtcaagagagcgacagagaggaactgaactactggaagcggaggtacaacgagaacaccgagctgcggaaaaccggcactgagctggtgtccagacagcactctcctggctctgccgatagcctgagcaacgactcccagagagagttcaacagcagacccggcacaggctacgtgcccgtggaattttggaagaaaaccgaagaggccgtgaacaaagtcaagattcaggccatgagcgaggtgcagaaagccgtggctgaggccgaacagaaagccttcgaagtgatcgccaccgagcgggccagaatggaacagacaatcgccgacgtgaagagacaggccgccgaggatgccttcctggtcatcaacgagcaagaggaaagcaccgagaactgctggaactgcggcagaaaggccagcgagacatgcagcggctgcaatatcgccagatattgcggcagcttctgccagcacaaggactgggagagacaccacagactgtgcggccagaatctgcacggacagagccctcatggacagggcagacctctgctccctgttggcagaggatctagcgccagatctgccgactgtagcgtgccatctcctgcactggataagaccagcgccaccacaagcagaagcagcacaccagcctctgtgaccgccatcgataccaacggactgtgatgatgaggactagtccctgttcccagagcccacttttttttctttttttgaaataaaatagcctgtctttcagatctcaaaggctcttttcagagccaccaaaaaaaaaaaaaaaaaaaaaaaaaaaaaaaaaaaaaaaaaaaaaaaaaaaaaaaaaaaaaaaaaaaaaaaaaaaaaaaaaaaaaaaaaaaaaaaaaaaaa

SEQ ID NO: 937 - RNA, 2756 nt, synthetic construct
  misc_feature 1..2756: note = Artificial____RUNX1(1-241)_I_RUNX1T1b(22-604) mRNA opt3
  source 1..2756: mol_type = other RNA
aggagagtcccgcagtcggcgtccagcggctctgcttgttcgtgtgtgtgtcgttgcaggccttattcaagcttaccatgagaatccccgtggatgccagcaccagcagaagattcacccctcctagcaccgctctgagccctggcaagatgtctgaagctctgcctctgggagcacctgatgctggtgcagctctggccggaaaactgagaagcggcgacagatccatggtggaagtgctggctgatcaccccggcgaacttgtgcggacagacagccctaatttcctgtgcagcgtgctgcctacacactggcggtgcaacaagacactgcctatcgccttcaaggtggtggctctgggagatgtgcctgatggcacactggtcacagtgatggccggcaacgacgagaattacagcgccgagctgagaaatgccaccgccgccatgaagaaccaggtggccagattcaacgacctgagattcgtgggcagaagcggcaggggcaagagctttaccctgaccatcaccgtgttcaccaatcctccacaggtggcaacctaccaccgggccatcaagatcaccgtggatggccctagagagcccagacggcacagacagaaactggacgaccagaccaagcctggcagcctgagctttagcgagagactgagcgagctggaacagctgagaagaaccgccatgcgggtgtccccacatcaccctgctcctacacctaatcctcgggccagcctgaatcacagcaccgcctttaatccccagcctcagagccagatgcagatcggccctgagaaaagggtgccagccatgcctggaagccccgtggaagtgaagatccagagcagatctagccctcctaccatgcctcctctgcctccaatcaatcctggcggccctagacctgtgtccttcacacctaccgctctgtccaacggcatcaatcacagccctccaacactgaatggcgccccatctccacctcagcggttttctaatggccctgccagcagcacaagcagcgccctgacaaatcagcagctgcctgctacatgtggcgccagacagctgagcaagctgaagcggtttctgaccacactgcagcagttcggcaacgatatcagccccgagatcggcgagaaagtgcggacactggttctggccctggtcaacagcaccgtgaccatcgaagagttccactgcaagctgcaagaggccaccaactttccgctgcggcctttcgtgatcccattcctgaaggccaacctgcctctgctgcagagagagctgctgcattgcgccagagccgccaagcagacaccttctcagtatctggcccagcacgagcatctgctgctgaacacctctatcgcctctccagccgatagcagcgagctgctcatggaagtgcacggcaacggaaagaggccctctccagagcggagagaggaaaacagcttcgaccgggacacaatcgcccctgagcctccagccaagagagtgtgcacaatcagcccagctcctagacacagccccgctctgacagtgccccttatgaaccctggcggacagtttcaccccacacctccaccactccagcactacaccctggaagatatcgccaccagccacctgtaccgcgagcctaacaagatgctggaacaccgggaagtgcgcgacaggcaccattctctgggactgaacggcggctaccaggacgaactggtggatcacagactgaccgagcgcgagtgggccgatgaatggaaacacctggatcacgccctgaactgcatcatggaaatggtggaaaagacccggcggagcatggccgtcctgagaagatgtcaagagagcgacagagaggaactgaactactggaagcggaggtacaacgagaacaccgagctgcggaaaaccggcactgagctggtgtccagacagcactctcctggctctgccgatagcctgagcaacgactcccagagagagttcaacagcagacccggcacaggctacgtgcccgtggaattttggaagaaaaccgaagaggccgtgaacaaagtcaagattcaggccatgagcgaggtgcagaaagccgtggctgaggccgaacagaaagccttcgaagtgatcgccaccgagcgggccagaatggaacagacaatcgccgacgtgaagagacaggccgccgaggatgccttcctggtcatcaacgagcaagaggaaagcaccgagaactgctggaactgcggcagaaaggccagcgagacatgcagcggctgcaatatcgccagatattgcggcagcttctgccagcacaaggactgggagagacaccacagactgtgcggccagaatctgcacggacagagccctcatggacagggcagacctctgctccctgttggcagaggatctagcgccagatctgccgactgtagcgtgccatctcctgcactggataagaccagcgccaccacaagcagaagcagcacaccagcctctgtgaccgccatcgataccaacggactgtgatgatgaggactagtccctgttcccagagcccacttttttttctttttttgaaataaaatagcctgtctttcagatctcaaaggctcttttcagagccaccaaaaaaaaaaaaaaaaaaaaaaaaaaaaaaaaaaaaaaaaaaaaaaaaaaaaaaaaaaaaaaaaaaaaaaaaaaaaaaaaaaaaaaaaaaaaaaaaaaaaa

SEQ ID NO: 938 - RNA, 1640 nt, synthetic construct
  misc_feature 1..1640: note = Homo sapiens__Q01196-1__RUNX1(K83E_R174Q) mRNA opt3
  source 1..1640: mol_type = other RNA
aggagagtcccgcagtcggcgtccagcggctctgcttgttcgtgtgtgtgtcgttgcaggccttattcaagcttaccatgagaatccccgtggacgccagcacctccaggcggttcacacctccatctactgctctgtcaccgggcaagatgagtgaggcactcccccttggggcccctgatgcgggagctgccctggcaggtaaattgcgcagcggcgaccgatccatggtcgaagttttagccgatcacccaggggagctggtgcgtacggactctcccaactttctatgctcggtactccctacccattggagatgtaatgaaacactgccaattgctttcaaggtggtcgcacttggagatgtgcccgacggcactctggttaccgtgatggccggtaacgatgagaattactcagctgaattgaggaacgccacagcggcaatgaaaaatcaggtcgcccggtttaacgacctccgcttcgtggggagaagcggaaggggcaagagttttaccctgactataacagtattcaccaatcctccacaagttgctacgtatcaccgggccatcaaaattactgtggatggcccgcaggagccccgccgacatagacagaagctggacgatcagaccaagcctgggtccctctcttttagcgagaggttatccgaactggagcaacttcggcgtacagcaatgcgcgtctcaccacaccatcccgctcctactccaaaccccagagccagtttgaatcacagcaccgcgttcaacccgcagcctcagtctcagatgcaagacacaaggcagatccagccctccccaccttggtcatacgatcagagctatcaatacctgggaagtattgcctctccctccgtgcacccagcaacccccatcagccctggtcgggcttcgggcatgacgactctatctgccgaactctcctcacgactgagtacagctccagaccttaccgcctttagcgacccgcgccagttccccgcactgccttccatatctgatccaagaatgcattatcccggggcctttacttacagccctacaccagtgacctcaggaatcggcattggtatgagtgctatggggtccgcgacgaggtatcacacctacttgcccccgccttacccaggaagctctcaggcacaaggcggccccttccaggcctcaagtcctagctatcatctctactatggggcttccgccggatcttaccagttttcgatggtcggtggcgagcggagcccaccccgcatcctgcctccctgcacaaatgcatccactgggtcagccttactgaacccaagtctcccgaatcagtctgacgttgtggaggctgaaggaagccactccaactcacctaccaatatggcccccagcgcaagacttgaggaagcggtatggaggccatattgatgatgaggactagtccctgttcccagagcccacttttttttctttttttgaaataaaatagcctgtctttcagatctcaaaggctcttttcagagccaccaaaaaaaaaaaaaaaaaaaaaaaaaaaaaaaaaaaaaaaaaaaaaaaaaaaaaaaaaaaaaaaaaaaaaaaaaaaaaaaaaaaaaaaaaaaaaaaaaaaaa

SEQ ID NO: 939 - RNA, 2114 nt, synthetic construct
  misc_feature 1..2114: note = Homo sapiens____CBFbeta(1-165)_SMMHC(1527-1972) mRNA opt3
  source 1..2114: mol_type = other RNA
aggagagtcccgcagtcggcgtccagcggctctgcttgttcgtgtgtgtgtcgttgcaggccttattcaagcttaccatgcccagagtggtccctgaccagaggagcaagttcgagaacgaagagtttttccggaaactgtcccgcgaatgcgagatcaagtacaccggctttcgagatcgtccacacgaagagagacaagccaggttccagaatgcttgtcgggacgggcgctctgagattgcatttgttgccacaggaactaacctctcacttcagttctttccggcgagttggcagggtgaacaaagacagacgcccagcagggagtatgtggatctggaacgggaggctggcaaagtatacttgaaggcccctatgatattaaatggggtgtgcgtcatctggaaaggatggattgacctgcagcgcctagatggcatgggttgtctcgagttcgacgaggaacgagcacagcaagaagatgccctggctcagcaggcatttgaggaagccagaaggcggacccgtgagttcgaggaccgcgatagatcccatagggaagagatggaagtgcacgagcttgaaaagtctaagcgggctctggagacacagatggaggaaatgaaaactcaattggaggaactcgaggacgaactgcaggccaccgaggatgcgaagctgcgactcgaggttaacatgcaggcattaaaagggcaatttgaacgcgacctgcaggccagagatgagcagaatgaagagaagaggcggcagcttcaacgccagttgcatgagtatgaaacagagctggaagacgagagaaaacagagggctctagccgcagctgccaagaagaaactcgaaggagacctgaaggatcttgagctgcaggcggactcggccatcaaaggccgtgaggaagcaattaagcaattgcggaaactccaggctcagatgaaggatttccagcgagagctggaagacgccagagcttcaagggatgagatctttgccaccgcaaaagaaaacgagaagaaggccaagagcttagaggctgacctgatgcaactccaggaagatcttgcggcagccgagcgcgctcggaagcaggccgacctggaaaaagaggaattggcagaggagctagccagttccctgtctggcagaaatgctctccaggatgaaaagaggcgcctggaggcccgaatagcacaacttgaagaggagctggaagaggaacaggggaacatggaggcgatgagcgaccgggtgcgtaaagctactcagcaagccgaacagttgtccaatgagctcgcaacagagagatcaaccgcccagaagaacgaaagtgctaggcagcaactggagcgccagaataaggaattacggagcaaactgcacgagatggaaggagccgtcaagtctaaattcaagtccacgatcgcagctctagaggccaaaattgcgcagctcgaggaacaggtggagcaagaagccagagagaagcaggctgcaactaagtcactgaaacagaaggataaaaagttgaaagaaatccttctgcaggtagaggacgagaggaagatggccgaacaatacaaggagcaggctgaaaaaggtaacgcccgagttaagcagctcaaacgccaactggaggaggcagaagaggaaagccagcggattaatgcgaacagaaggaaacttcagcgtgagctggacgaagccaccgagagtaatgaggctatgggccgcgaagtgaacgccttgaaatctaagctccggagagggaacgagacatccttcgtcccaagcaggcgatcgggaggccggcgcgtgatcgaaaatgcagatggttctgaggaagagactgacaccagagatgctgactttaacgggacaaaagcctccgagtgatgatgaggactagtccctgttcccagagcccacttttttttctttttttgaaataaaatagcctgtctttcagatctcaaaggctcttttcagagccaccaaaaaaaaaaaaaaaaaaaaaaaaaaaaaaaaaaaaaaaaaaaaaaaaaaaaaaaaaaaaaaaaaaaaaaaaaaaaaaaaaaaaaaaaaaaaaaaaaaaaa

SEQ ID NO: 940 - RNA, 1829 nt, synthetic construct
  misc_feature 1..1829: note = Artificial____CBFbeta(1-165)_SMMHC(1527-1877) mRNA opt3
  source 1..1829: mol_type = other RNA
aggagagtcccgcagtcggcgtccagcggctctgcttgttcgtgtgtgtgtcgttgcaggccttattcaagcttaccatgcccagagtggtccctgaccagaggagcaagttcgagaacgaagagtttttccggaaactgtcccgcgaatgcgagatcaagtacaccggctttcgagatcgtccacacgaagagagacaagccaggttccagaatgcttgtcgggacgggcgctctgagattgcatttgttgccacaggaactaacctctcacttcagttctttccggcgagttggcagggtgaacaaagacagacgcccagcagggagtatgtggatctggaacgggaggctggcaaagtatacttgaaggcccctatgatattaaatggggtgtgcgtcatctggaaaggatggattgacctgcagcgcctagatggcatgggttgtctcgagttcgacgaggaacgagcacagcaagaagatgccctggctcagcaggcatttgaggaagccagaaggcggacccgtgagttcgaggaccgcgatagatcccatagggaagagatggaagtgcacgagcttgaaaagtctaagcgggctctggagacacagatggaggaaatgaaaactcaattggaggaactcgaggacgaactgcaggccaccgaggatgcgaagctgcgactcgaggttaacatgcaggcattaaaagggcaatttgaacgcgacctgcaggccagagatgagcagaatgaagagaagaggcggcagcttcaacgccagttgcatgagtatgaaacagagctggaagacgagagaaaacagagggctctagccgcagctgccaagaagaaactcgaaggagacctgaaggatcttgagctgcaggcggactcggccatcaaaggccgtgaggaagcaattaagcaattgcggaaactccaggctcagatgaaggatttccagcgagagctggaagacgccagagcttcaagggatgagatctttgccaccgcaaaagaaaacgagaagaaggccaaaagccttgaggctgacctgatgcaactccaggaagatcttgcggcagccgagcgcgctcggaagcaggccgacctggaaaaagaggaattggcagaggagctagccagttccctgtctggcagaaatgctctccaggatgaaaagaggcgcctggaggcccgaatagcacaacttgaagaggagctggaagaggaacaggggaacatggaggcgatgagcgaccgggtgcgtaaagctactcagcaagccgaacagttgtccaatgagctcgcaacagagagatcaaccgcccagaagaacgaaagtgctaggcagcaactggagcgccagaataaggaattacggagcaaactgcacgagatggaaggagccgtcaagtctaaattcaagtccacgatcgcagctctagaggccaaaattgcgcagctcgaggaacaggtggagcaagaagccagagagaagcaggctgcaactaagtcactgaaacagaaggataaaaagttaaaagaaatcttgctgcaggtagaggacgagaggaagatggccgaacaatacaaggagcaggctgaaaaaggtaacgcctgatgatgaggactagtccctgttcccagagcccacttttttttctttttttgaaataaaatagcctgtctttcagatctcaaaggctcttttcagagccaccaaaaaaaaaaaaaaaaaaaaaaaaaaaaaaaaaaaaaaaaaaaaaaaaaaaaaaaaaaaaaaaaaaaaaaaaaaaaaaaaaaaaaaaaaaaaaaaaaaaaa

SEQ ID NO: 941 - RNA, 890 nt, synthetic construct
  misc_feature 1..890: note = Artificial____CBFbeta(1-165)_Linker_Lifeact mRNA opt3
  source 1..890: mol_type = other RNA
aggagagtcccgcagtcggcgtccagcggctctgcttgttcgtgtgtgtgtcgttgcaggccttattcaagcttaccatgcccagagtggtccctgaccagaggagcaagttcgagaacgaagagtttttccggaaactgtcccgcgaatgcgagatcaagtacaccggctttcgagatcgtccacacgaagagagacaagccaggttccagaatgcttgtcgggacgggcgctctgagattgcatttgttgccacaggaactaacctctcacttcagttctttccggcgagttggcagggtgaacaaagacagacgcccagcagggagtatgtggatctggaacgggaggctggcaaagtatacttgaaggcccctatgatattaaatggggtgtgcgtcatctggaaaggatggattgacctgcagcgcctagatggcatgggttgtctcgagttcgacgaggaacgagcacagcaagaagatgccctggctcagcaggcatttgaggaagccagaaggcggacccgtgagttcgaggaccgcgatagatcccatagggaagagatggaagggggatctggcggctcagggggatcgggtggcagcgggggaggcggtgtggctgaccttatcaagaagtttgagagtatttccaaagaagagggggatccacccgttgccacatgatgatgaggactagtccctgttcccagagcccacttttttttctttttttgaaataaaatagcctgtctttcagatctcaaaggctcttttcagagccaccaaaaaaaaaaaaaaaaaaaaaaaaaaaaaaaaaaaaaaaaaaaaaaaaaaaaaaaaaaaaaaaaaaaaaaaaaaaaaaaaaaaaaaaaaaaaaaaaaaaaa

SEQ ID NO: 942 - RNA, 857 nt, synthetic construct
  misc_feature 1..857: note = Artificial____CBFbeta(1-165)_HIF1alpha(549-575) mRNA opt3
  source 1..857: mol_type = other RNA
aggagagtcccgcagtcggcgtccagcggctctgcttgttcgtgtgtgtgtcgttgcaggccttattcaagcttaccatgcccagagtggtccctgaccagaggagcaagttcgagaacgaagagtttttccggaaactgtcccgcgaatgcgagatcaagtacaccggctttcgagatcgtccacacgaagagagacaagccaggttccagaatgcttgtcgggacgggcgctctgagattgcatttgttgccacaggaactaacctctcacttcagttctttccggcgagttggcagggtgaacaaagacagacgcccagcagggagtatgtggatctggaacgggaggctggcaaagtatacttgaaggcccctatgatattaaatggggtgtgcgtcatctggaaaggatggattgacctgcagcgcctagatggcatgggttgtctcgagttcgacgaggaacgagcacagcaagaagatgccctggctcagcaggcatttgaggaagccagaaggcggacccgtgagttcgaggaccgcgatagatcccatagggaagagatggaaccattttctacacaggacactgatcttgacctggagatgttggctccctatatccctatggatgacgacttccaactccggtgatgatgaggactagtccctgttcccagagcccacttttttttctttttttgaaataaaatagcctgtctttcagatctcaaaggctcttttcagagccaccaaaaaaaaaaaaaaaaaaaaaaaaaaaaaaaaaaaaaaaaaaaaaaaaaaaaaaaaaaaaaaaaaaaaaaaaaaaaaaaaaaaaaaaaaaaaaaaaaaaaa

SEQ ID NO: 943 - RNA, 902 nt, synthetic construct
  misc_feature 1..902: note Artificial____CBFbeta(1-165)_Linker_HIF1alpha(549-575) mRNA opt3
  source 1..902: mol_type = other RNA
aggagagtcccgcagtcggcgtccagcggctctgcttgttcgtgtgtgtgtcgttgcaggccttattcaagcttaccatgcccagagtggtccctgaccagaggagcaagttcgagaacgaagagtttttccggaaactgtcccgcgaatgcgagatcaagtacaccggctttcgagatcgtccacacgaagagagacaagccaggttccagaatgcttgtcgggacgggcgctctgagattgcatttgttgccacaggaactaacctctcacttcagttctttccggcgagttggcagggtgaacaaagacagacgcccagcagggagtatgtggatctggaacgggaggctggcaaagtatacttgaaggcccctatgatattaaatggggtgtgcgtcatctggaaaggatggattgacctgcagcgcctagatggcatgggttgtctcgagttcgacgaggaacgagcacagcaagaagatgccctggctcagcaggcatttgaggaagccagaaggcggacccgtgagttcgaggaccgcgatagatcccatagggaagagatggaagggggatctggcggctcagggggatcgggtggcagcgggggaggcccatttagtacacaggacactgatcttgacctggagatgttggctccctatatccctatggatgacgacttccaactccggtgatgatgaggactagtccctgttcccagagcccacttttttttctttttttgaaataaaatagcctgtctttcagatctcaaaggctcttttcagagccaccaaaaaaaaaaaaaaaaaaaaaaaaaaaaaaaaaaaaaaaaaaaaaaaaaaaaaaaaaaaaaaaaaaaaaaaaaaaaaaaaaaaaaaaaaaaaaaaaaaaaa

SEQ ID NO: 944 - RNA, 2537 nt, synthetic construct
  misc_feature 1..2537: note = Artificial____RUNX1(1-177)_N_RUNX1T1a(31-604) mRNA opt3
  source 1..2537: mol_type = other RNA
aggagagtcccgcagtcggcgtccagcggctctgcttgttcgtgtgtgtgtcgttgcaggccttattcaagcttaccatgagaatccccgtggacgccagcacctccaggcggttcacacctccatctactgctctgtcaccgggcaagatgagtgaggcactcccccttggggcccctgatgcgggagctgccctggcaggtaaattgcgcagcggcgaccgatccatggtcgaagttttagccgatcacccaggggagctggtgcgtacggactctcccaactttctatgctcggtactccctacccattggagatgtaataagacactgccaattgctttcaaagtggtcgcacttggagatgtgcccgacggcactctggttaccgtgatggccggtaacgatgaaaattactcagctgagttgaggaacgccacagcggcaatgaagaatcaggtcgcccggtttaacgacctccgcttcgtggggagaagcggaaggggcaaaagttttaccctgactataacagtattcaccaatcctccacaagttgctacgtatcaccgggccatcaagattactgtggatggcccgcgcgaaccccgaaacagaaccgagaagcattccacaatgcctgactctccagtcgatgtgaaaactcagagcaggctgacaccccctaccatgccacccccgcctaccacgcagggggcaccccggacttcctcatttacaccaaccactctcacaaatggaaccagtcacagccctacggctttaaacggtgccccctctccacccaatggcttctccaacgggccttcaagcagttcttccagctcgctggcgaatcagcaacttccaccggcctgcggagcacgtcagttgtctaagctgaaacgctttctaaccacactccagcagttcggcaacgacatctcccccgagattggtgaaagagtgaggactctggtccttgggctggttaattcaaccttgacaatcgaggaatttcatagtaagctccaagaggctactaacttccctctgcggccatttgtgatacccttcttaaaagccaacctgcctctccttcagcgagagctgttgcactgtgctcgcctagccaagcagaatccagcacagtacctggcccaacacgaacagctcctgcttgatgctagcaccacatcccccgtagactctagcgagctgttgctcgacgtgaacgaaaatggaaagagaaggaccccggatcggactaaagagaacggcttcgaccgcgaacctctgcattcagagcacccaagtaagagaccctgcacgatctcccctggccagaggtatagccccaataacgggttatcttaccaaccaaatggactgcctcatcccacaccaccgcctccccagcactatcgtctagatgacatggcgattgcacaccattaccgggattcatatcgacacccaagtcatagagacctcagggatcgcaaccggcccatgggtctgcacggcaccagacaggaggaaatgatcgaccataggcttactgatcgcgagtgggccgaagagtggaaacacttggaccatctgctcaattgtattatggatatggtcgaaaagacccgacggagcctgacagtgcttcgtagatgccaggaggctgacagggaggaactgaactactggatccgccggtactccgacgccgaggatttgaaaaagggcggagggtcttcgagctcccactcaagacaacagagtcctgttaatccagaccccgtggcactcgatgcccacagggaatttctgcatcgacctgcttctggttatgtcccggaggaaatatggaaaaaggccgaggaggcagtgaacgaagtaaagcgccaggcgatgaccgagttacagaaagctgttagcgaagccgagcggaaggcacacgacatgattactacagagagagccaaaatggaaaggacggtggctgaggccaagcgtcaagcagctgaagatgccctggcggtcatcaatcagcaggaggactcctcagaaagctgttggaactgcgggcgcaaagcctctgagacctgttccggctgcaatactgctcggtactgtggaagtttctgccagcacaaggattgggagaagcatcaccatatttgcggccaaacactacaggcacagcagcaaggggacaccccagccgtgtctagctccgtcacacccaactcaggagctggtagtcctatggatactccacccgccgcaacccctagaagcacgaccccgggcacaccctcgactatcgaaaccacaccaaggtgatgatgaggactagtccctgttcccagagcccacttttttttctttttttgaaataaaatagcctgtctttcagatctcaaaggctcttttcagagccaccaaaaaaaaaaaaaaaaaaaaaaaaaaaaaaaaaaaaaaaaaaaaaaaaaaaaaaaaaaaaaaaaaaaaaaaaaaaaaaaaaaaaaaaaaaaaaaaaaaaaa

SEQ ID NO: 945 - RNA, 1052 nt, synthetic construct
  misc_feature 1..1052: note = Artificial____RUNX1(1-241)_RUNX1T1b(short) mRNA opt3
  source 1..1052: mol_type = other RNA
aggagagtcccgcagtcggcgtccagcggctctgcttgttcgtgtgtgtgtcgttgcaggccttattcaagcttaccatgagaatccccgtggacgccagcacctccaggcggttcacacctccatctactgctctgtcaccgggcaagatgagtgaggcactcccccttggggcccctgatgcgggagctgccctggcaggtaaattgcgcagcggcgaccgatccatggtcgaagttttagccgatcacccaggggagctggtgcgtacggactctcccaactttctatgctcggtactccctacccattggagatgtaataagacactgccaattgctttcaaagtggtcgcacttggagatgtgcccgacggcactctggttaccgtgatggccggtaacgatgaaaattactcagctgagttgaggaacgccacagcggcaatgaagaatcaggtcgcccggtttaacgacctccgcttcgtggggagaagcggaaggggcaaaagttttaccctgactataacagtattcaccaatcctccacaagttgctacgtatcaccgggccatcaagattactgtggatggcccgcgcgaaccccgaagacataggcagaagctggacgatcagaccaaacctgggtccctctcttttagcgagcggttatccgagctggaacagcttcgtcgcacagcaatgagagtctcaccacaccatcccgctcctactccaaaccccagggccagtttgaatcacagcaccgcgttcaacccgcaacctcagtctcagatgcaggaggtgggattttgccacgtggcccaagtcggtctgaagctactcggctgatgatgaggactagtccctgttcccagagcccacttttttttctttttttgaaataaaatagcctgtctttcagatctcaaaggctcttttcagagccaccaaaaaaaaaaaaaaaaaaaaaaaaaaaaaaaaaaaaaaaaaaaaaaaaaaaaaaaaaaaaaaaaaaaaaaaaaaaaaaaaaaaaaaaaaaaaaaaaaaaaa

SEQ ID NO: 946 - RNA, 2756 nt, synthetic construct
  misc_feature 1..2756: note = Artificial____RUNX1(1-241)_V_RUNX1T1b(22-604) mRNA opt3
  source 1..2756: mol_type = other RNA
aggagagtcccgcagtcggcgtccagcggctctgcttgttcgtgtgtgtgtcgttgcaggccttattcaagcttaccatgagaatccccgtggacgccagcacctccaggcggttcacacctccatctactgctctgtcaccgggcaagatgagtgaggcactcccccttggggcccctgatgcgggagctgccctggcaggtaaattgcgcagcggcgaccgatccatggtcgaagttttagccgatcacccaggggagctggtgcgtacggactctcccaactttctatgctcggtactccctacccattggagatgtaataagacactgccaattgctttcaaagtggtcgcacttggagatgtgcccgacggcactctggttaccgtgatggccggtaacgatgaaaattactcagctgagttgaggaacgccacagcggcaatgaagaatcaggtcgcccggtttaacgacctccgcttcgtggggagaagcggaaggggcaaaagttttaccctgactataacagtattcaccaatcctccacaagttgctacgtatcaccgggccatcaagattactgtggatggcccgcgcgaaccccgaagacataggcagaagctggacgatcagaccaaacctgggtccctctcttttagcgagcggttatccgagctggaacagcttcgtcgcacagcaatgagagtctcaccacaccatcccgctcctactccaaaccccagggccagtttgaatcacagcaccgcgttcaacccgcaacctcagtctcagatgcaagtgggacccgagaagcgggtgccagccatgcctggttcccccgtcgaagttaaaatccagtcacgaagcagtccacccacaatgcctccactgccgcccattaatcctggcgggccacgccccgtgtcttttacccctacggcactatccaacggaatcaatcacagcccacccactctcaacggcgctccgtcgcctccacagagattctctaatggtcccgcctcctcaacaagtagcgctctgaccaaccagcagcttcctgccacttgcggggcaaggcaactgtccaagttgaaacggtttctcacaaccctgcagcagttcggaaacgacatatctcccgagatcggcgagaaggtacgcacgttagtgctggccctcgtcaatagcaccgtgacaattgaagagtttcattgtaagctacaagaagctactaacttcccactgagacctttcgttatcccctttttgaaagcgaatctaccactgctccagagggagctgcttcactgcgcacgtgccgctaagcagaccccgtcacagtacctggcccaacatgaacacttgctcctgaacacaagtattgcatcccctgccgatagctctgagttactgatggaggtgcacggcaatgggaaacggccctcaccagaacgaagagaggaaaacagtttcgacagggacactatcgctcccgagcctccagccaagcgcgtctgtaccataagccccgcacctcggcattccccggcgctaacagtgccactcatgaatcccggaggtcagtttcaccctaccccaccccctctgcagcattatactcttgaagatattgctacgtctcacttgtacagagagccgaacaaaatgctggagcatagggaagtacgcgaccgacaccactcgctcggcctgaatgggggatatcaggatgagcttgttgaccatcggctgacagaacgtgagtgggccgatgaatggaagcacttggaccatgcactcaactgcatcatggagatggtggagaaaaccagaaggagcatggccgtcctgcgccggtgtcaagaatccgatagagaggaattaaattactggaagaggcgatataacgagaatactgagctgcgcaagaccggcacagaacttgtgtcacggcagcacagtcccggttctgctgacagcctctccaacgattcacagagagagttcaatagcaggccagggaccggctacgtccctgtggaattttggaaaaagactgaggaagccgttaacaaagtgaagattcaggcaatgtctgaggtacaaaaagctgtcgccgaggcggaacagaaggccttcgaggtgatcgctacagaacgtgcacgcatggagcagacgatcgccgacgttaagcggcaggctgccgaagatgcatttctggtgattaacgagcaagaggaatccaccgagaattgctggaactgtggaagaaaagcgagtgaaacttgcagcggctgtaatatagccaggtactgcgggtctttctgccagcacaaggactgggagcgacatcaccggctttgtggacagaacttgcatggtcaatcaccccacggccaggggcgcccactgctccctgtcggaagaggctccagtgctaggagcgccgactgctcggtgccctccccagcactggataaaacatctgctaccacaagccggtcaagtactccggcctccgtaaccgcaatcgacacgaatggtttatgatgatgaggactagtccctgttcccagagcccacttttttttctttttttgaaataaaatagcctgtctttcagatctcaaaggctcttttcagagccaccaaaaaaaaaaaaaaaaaaaaaaaaaaaaaaaaaaaaaaaaaaaaaaaaaaaaaaaaaaaaaaaaaaaaaaaaaaaaaaaaaaaaaaaaaaaaaaaaaaaaa

SEQ ID NO: 947 - RNA, 2756 nt, synthetic construct
  misc_feature 1..2756: note = Artificial____RUNX1(1-241)_I_RUNX1T1b(22-604) mRNA opt3
  source 1..2756: mol_type = other RNA
aggagagtcccgcagtcggcgtccagcggctctgcttgttcgtgtgtgtgtcgttgcaggccttattcaagcttaccatgagaatccccgtggacgccagcacctccaggcggttcacacctccatctactgctctgtcaccgggcaagatgagtgaggcactcccccttggggcccctgatgcgggagctgccctggcaggtaaattgcgcagcggcgaccgatccatggtcgaagttttagccgatcacccaggggagctggtgcgtacggactctcccaactttctatgctcggtactccctacccattggagatgtaataagacactgccaattgctttcaaagtggtcgcacttggagatgtgcccgacggcactctggttaccgtgatggccggtaacgatgaaaattactcagctgagttgaggaacgccacagcggcaatgaagaatcaggtcgcccggtttaacgacctccgcttcgtggggagaagcggaaggggcaaaagttttaccctgactataacagtattcaccaatcctccacaagttgctacgtatcaccgggccatcaagattactgtggatggcccgcgcgaaccccgaagacataggcagaagctggacgatcagaccaaacctgggtccctctcttttagcgagcggttatccgagctggaacagcttcgtcgcacagcaatgagagtctcaccacaccatcccgctcctactccaaaccccagggccagtttgaatcacagcaccgcgttcaacccgcaacctcagtctcagatgcagatcggacccgagaagcgggtgccagccatgcctggttcccccgtggaagtcaaaattcaatcacgaagcagtccacccacaatgcctccactgccgcccatcaatcctggcgggccacgccccgtttcttttacccctacggcactatccaacggaataaatcacagcccacccactctcaacggcgctccgtcgcctccacagagattctctaatggtcccgcctcctcaacaagtagcgctctgaccaaccagcagcttcctgccacttgcggggcaaggcaactgtccaagttgaaacggtttctcacaaccctgcagcagttcggaaacgacatctctcccgagattggcgagaaggtgcgcacgttagtactggccctcgtgaatagcaccgtcacaatcgaagagtttcattgtaagctacaagaagctactaacttcccactgagacctttcgtgattccctttttgaaagcgaatctaccactgctccagagggagctgcttcactgcgcacgtgccgctaagcagaccccgtcacagtacctggcccaacatgaacacttgctcctgaacacaagtatcgcatcccctgccgatagctctgagttactgatggaggttcacggcaatgggaaacggccctcaccagaacgaagagaggaaaacagtttcgacagggacactatagctcccgagcctccagccaagcgcgtgtgtaccattagccccgcacctcggcattccccggcgctaacagtcccactcatgaatcccggaggtcagtttcaccctaccccaccccctctgcagcattatactcttgaagatatcgctacgtctcacttgtacagagagccgaacaaaatgctggagcatagggaagtgcgcgaccgacaccactcgctcggcctgaatgggggatatcaggatgagcttgtagaccatcggctgacagaacgtgagtgggccgatgaatggaagcacttggaccatgcactcaactgcattatggagatggttgagaaaaccagaaggagcatggccgtgctgcgccggtgtcaagaatccgatagagaggaattaaattactggaagaggcgatataacgagaatactgagctgcgcaagaccggcacagaacttgtctcacggcagcacagtcccggttctgctgacagcctctccaacgattcacagagagagttcaatagcaggccagggaccggctacgtgcctgtcgaattttggaaaaagactgaggaagccgtgaacaaagttaagatccaggcaatgtctgaggtgcaaaaagctgtagccgaggcggaacagaaggccttcgaggtcatcgctacagaacgtgcacgcatggagcagacgattgccgacgtgaagcggcaggctgccgaagatgcatttctggttataaacgagcaagaggaatccaccgagaattgctggaactgtggaagaaaagcgagtgaaacttgcagcggctgtaatatcgccaggtactgcgggtctttctgccagcacaaggactgggagcgacatcaccggctttgtggacagaacttgcatggtcaatcaccccacggccaggggcgcccactgctccctgtgggaagaggctccagtgctaggagcgccgactgctcggtcccctccccagcactggataaaacatctgctaccacaagccggtcaagtactccggcctccgtgaccgcaattgacacgaatggtttatgatgatgaggactagtccctgttcccagagcccacttttttttctttttttgaaataaaatagcctgtctttcagatctcaaaggctcttttcagagccaccaaaaaaaaaaaaaaaaaaaaaaaaaaaaaaaaaaaaaaaaaaaaaaaaaaaaaaaaaaaaaaaaaaaaaaaaaaaaaaaaaaaaaaaaaaaaaaaaaaaaa

SEQ ID NO: 948 - RNA, 1640 nt, synthetic construct
  misc_feature 1..1640: note = Homo sapiens__Q01196-1__RUNX1(K83E_R174Q) mRNA opt4
  source 1..1640: mol_type = other RNA
aggagagtcccgcagtcggcgtccagcggctctgcttgttcgtgtgtgtgtcgttgcaggccttattcaagcttaccatgagaatccccgtggacgccagcaccagcagaagattcaccccccccagcaccgccctgagccccggcaagatgagcgaggccctgcccctgggcgcccccgacgccggcgccgccctggccggcaagctgagaagcggcgacagaagcatggtggaggtgctggccgaccaccccggcgagctggtgagaaccgacagccccaacttcctgtgcagcgtgctgcccacccactggagatgcaacgagaccctgcccatcgccttcaaggtggtggccctgggcgacgtgcccgacggcaccctggtgaccgtgatggccggcaacgacgagaactacagcgccgagctgagaaacgccaccgccgccatgaagaaccaggtggccagattcaacgacctgagattcgtgggcagaagcggcagaggcaagagcttcaccctgaccatcaccgtgttcaccaaccccccccaggtggccacctaccacagagccatcaagatcaccgtggacggcccccaggagcccagaagacacagacagaagctggacgaccagaccaagcccggcagcctgagcttcagcgagagactgagcgagctggagcagctgagaagaaccgccatgagagtgagcccccaccaccccgcccccacccccaaccccagagccagcctgaaccacagcaccgccttcaacccccagccccagagccagatgcaggacaccagacagatccagcccagccccccctggagctacgaccagagctaccagtacctgggcagcatcgccagccccagcgtgcaccccgccacccccatcagccccggcagagccagcggcatgaccaccctgagcgccgagctgagcagcagactgagcaccgcccccgacctgaccgccttcagcgaccccagacagttccccgccctgcccagcatcagcgaccccagaatgcactaccccggcgccttcacctacagccccacccccgtgaccagcggcatcggcatcggcatgagcgccatgggcagcgccaccagataccacacctacctgccccccccctaccccggcagcagccaggcccagggcggccccttccaggccagcagccccagctaccacctgtactacggcgccagcgccggcagctaccagttcagcatggtgggcggcgagagaagcccccccagaatcctgcccccctgcaccaacgccagcaccggcagcgccctgctgaaccccagcctgcccaaccagagcgacgtggtggaggccgagggcagccacagcaacagccccaccaacatggcccccagcgccagactggaggaggccgtgtggagaccctactgatgatgaggactagtccctgttcccagagcccacttttttttctttttttgaaataaaatagcctgtctttcagatctcaaaggctcttttcagagccaccaaaaaaaaaaaaaaaaaaaaaaaaaaaaaaaaaaaaaaaaaaaaaaaaaaaaaaaaaaaaaaaaaaaaaaaaaaaaaaaaaaaaaaaaaaaaaaaaaaaaa

SEQ ID NO: 949 - RNA, 2114 nt, synthetic construct
  misc_feature 1..2114: note = Homo sapiens____CBFbeta(1-165)_SMMHC(1527-1972) mRNA opt4
  source 1..2114: mol_type = other RNA
aggagagtcccgcagtcggcgtccagcggctctgcttgttcgtgtgtgtgtcgttgcaggccttattcaagcttaccatgcccagagtggtgcccgaccagagaagcaagttcgagaacgaggagttcttcagaaagctgagcagagagtgcgagatcaagtacaccggcttcagagacagaccccacgaggagagacaggccagattccagaacgcctgcagagacggcagaagcgagatcgccttcgtggccaccggcaccaacctgagcctgcagttcttccccgccagctggcagggcgagcagagacagacccccagcagagagtacgtggacctggagagagaggccggcaaggtgtacctgaaggcccccatgatcctgaacggcgtgtgcgtgatctggaagggctggatcgacctgcagagactggacggcatgggctgcctggagttcgacgaggagagagcccagcaggaggacgccctggcccagcaggccttcgaggaggccagaagaagaaccagagagttcgaggacagagacagaagccacagagaggagatggaggtgcacgagctggagaagagcaagagagccctggagacccagatggaggagatgaagacccagctggaggagctggaggacgagctgcaggccaccgaggacgccaagctgagactggaggtgaacatgcaggccctgaagggccagttcgagagagacctgcaggccagagacgagcagaacgaggagaagagaagacagctgcagagacagctgcacgagtacgagaccgagctggaggacgagagaaagcagagagccctggccgccgccgccaagaagaagctggagggcgacctgaaggacctggagctgcaggccgacagcgccatcaagggcagagaggaggccatcaagcagctgagaaagctgcaggcccagatgaaggacttccagagagagctggaggacgccagagccagcagagacgagatcttcgccaccgccaaggagaacgagaagaaggccaagagcctggaggccgacctgatgcagctgcaggaggacctggccgccgccgagagagccagaaagcaggccgacctggagaaggaggagctggccgaggagctggccagcagcctgagcggcagaaacgccctgcaggacgagaagagaagactggaggccagaatcgcccagctggaggaggagctggaggaggagcagggcaacatggaggccatgagcgacagagtgagaaaggccacccagcaggccgagcagctgagcaacgagctggccaccgagagaagcaccgcccagaagaacgagagcgccagacagcagctggagagacagaacaaggagctgagaagcaagctgcacgagatggagggcgccgtgaagagcaagttcaagagcaccatcgccgccctggaggccaagatcgcccagctggaggagcaggtggagcaggaggccagagagaagcaggccgccaccaagagcctgaagcagaaggacaagaagctgaaggagatcctgctgcaggtggaggacgagagaaagatggccgagcagtacaaggagcaggccgagaagggcaacgccagagtgaagcagctgaagagacagctggaggaggccgaggaggagagccagagaatcaacgccaacagaagaaagctgcagagagagctggacgaggccaccgagagcaacgaggccatgggcagagaggtgaacgccctgaagagcaagctgagaagaggcaacgagaccagcttcgtgcccagcagaagaagcggcggcagaagagtgatcgagaacgccgacggcagcgaggaggagaccgacaccagagacgccgacttcaacggcaccaaggccagcgagtgatgatgaggactagtccctgttcccagagcccacttttttttctttttttgaaataaaatagcctgtctttcagatctcaaaggctcttttcagagccaccaaaaaaaaaaaaaaaaaaaaaaaaaaaaaaaaaaaaaaaaaaaaaaaaaaaaaaaaaaaaaaaaaaaaaaaaaaaaaaaaaaaaaaaaaaaaaaaaaaaaa

SEQ ID NO: 950 - RNA, 1829 nt, synthetic construct
  misc_feature 1..1829: note = Artificial____CBFbeta(1-165)_SMMHC(1527-1877) mRNA opt4
  source 1..1829: mol_type = other RNA
aggagagtcccgcagtcggcgtccagcggctctgcttgttcgtgtgtgtgtcgttgcaggccttattcaagcttaccatgcccagagtggtgcccgaccagagaagcaagttcgagaacgaggagttcttcagaaagctgagcagagagtgcgagatcaagtacaccggcttcagagacagaccccacgaggagagacaggccagattccagaacgcctgcagagacggcagaagcgagatcgccttcgtggccaccggcaccaacctgagcctgcagttcttccccgccagctggcagggcgagcagagacagacccccagcagagagtacgtggacctggagagagaggccggcaaggtgtacctgaaggcccccatgatcctgaacggcgtgtgcgtgatctggaagggctggatcgacctgcagagactggacggcatgggctgcctggagttcgacgaggagagagcccagcaggaggacgccctggcccagcaggccttcgaggaggccagaagaagaaccagagagttcgaggacagagacagaagccacagagaggagatggaggtgcacgagctggagaagagcaagagagccctggagacccagatggaggagatgaagacccagctggaggagctggaggacgagctgcaggccaccgaggacgccaagctgagactggaggtgaacatgcaggccctgaagggccagttcgagagagacctgcaggccagagacgagcagaacgaggagaagagaagacagctgcagagacagctgcacgagtacgagaccgagctggaggacgagagaaagcagagagccctggccgccgccgccaagaagaagctggagggcgacctgaaggacctggagctgcaggccgacagcgccatcaagggcagagaggaggccatcaagcagctgagaaagctgcaggcccagatgaaggacttccagagagagctggaggacgccagagccagcagagacgagatcttcgccaccgccaaggagaacgagaagaaggccaagagcctggaggccgacctgatgcagctgcaggaggacctggccgccgccgagagagccagaaagcaggccgacctggagaaggaggagctggccgaggagctggccagcagcctgagcggcagaaacgccctgcaggacgagaagagaagactggaggccagaatcgcccagctggaggaggagctggaggaggagcagggcaacatggaggccatgagcgacagagtgagaaaggccacccagcaggccgagcagctgagcaacgagctggccaccgagagaagcaccgcccagaagaacgagagcgccagacagcagctggagagacagaacaaggagctgagaagcaagctgcacgagatggagggcgccgtgaagagcaagttcaagagcaccatcgccgccctggaggccaagatcgcccagctggaggagcaggtggagcaggaggccagagagaagcaggccgccaccaagagcctgaagcagaaggacaagaagctgaaggagatcctgctgcaggtggaggacgagagaaagatggccgagcagtacaaggagcaggccgagaagggcaacgcctgatgatgaggactagtccctgttcccagagcccacttttttttctttttttgaaataaaatagcctgtctttcagatctcaaaggctcttttcagagccaccaaaaaaaaaaaaaaaaaaaaaaaaaaaaaaaaaaaaaaaaaaaaaaaaaaaaaaaaaaaaaaaaaaaaaaaaaaaaaaaaaaaaaaaaaaaaaaaaaaaaa

SEQ ID NO: 951 - RNA, 890 nt, synthetic construct
  misc_feature 1..890: note = Artificial____CBFbeta(1-165)_Linker_Lifeact mRNA opt4
  source 1..890: mol_type = other RNA
aggagagtcccgcagtcggcgtccagcggctctgcttgttcgtgtgtgtgtcgttgcaggccttattcaagcttaccatgcccagagtggtgcccgaccagagaagcaagttcgagaacgaggagttcttcagaaagctgagcagagagtgcgagatcaagtacaccggcttcagagacagaccccacgaggagagacaggccagattccagaacgcctgcagagacggcagaagcgagatcgccttcgtggccaccggcaccaacctgagcctgcagttcttccccgccagctggcagggcgagcagagacagacccccagcagagagtacgtggacctggagagagaggccggcaaggtgtacctgaaggcccccatgatcctgaacggcgtgtgcgtgatctggaagggctggatcgacctgcagagactggacggcatgggctgcctggagttcgacgaggagagagcccagcaggaggacgccctggcccagcaggccttcgaggaggccagaagaagaaccagagagttcgaggacagagacagaagccacagagaggagatggagggcggcagcggcggcagcggcggcagcggcggcagcggcggcggcggcgtggccgacctgatcaagaagttcgagagcatcagcaaggaggagggcgacccccccgtggccacctgatgatgaggactagtccctgttcccagagcccacttttttttctttttttgaaataaaatagcctgtctttcagatctcaaaggctcttttcagagccaccaaaaaaaaaaaaaaaaaaaaaaaaaaaaaaaaaaaaaaaaaaaaaaaaaaaaaaaaaaaaaaaaaaaaaaaaaaaaaaaaaaaaaaaaaaaaaaaaaaaaa

SEQ ID NO: 952 - RNA, 857 nt, synthetic construct
  misc_feature 1..857: note = Artificial____CBFbeta(1-165)_HIF1alpha(549-575) mRNA opt4
  source 1..857: mol_type = other RNA
aggagagtcccgcagtcggcgtccagcggctctgcttgttcgtgtgtgtgtcgttgcaggccttattcaagcttaccatgcccagagtggtgcccgaccagagaagcaagttcgagaacgaggagttcttcagaaagctgagcagagagtgcgagatcaagtacaccggcttcagagacagaccccacgaggagagacaggccagattccagaacgcctgcagagacggcagaagcgagatcgccttcgtggccaccggcaccaacctgagcctgcagttcttccccgccagctggcagggcgagcagagacagacccccagcagagagtacgtggacctggagagagaggccggcaaggtgtacctgaaggcccccatgatcctgaacggcgtgtgcgtgatctggaagggctggatcgacctgcagagactggacggcatgggctgcctggagttcgacgaggagagagcccagcaggaggacgccctggcccagcaggccttcgaggaggccagaagaagaaccagagagttcgaggacagagacagaagccacagagaggagatggagcccttcagcacccaggacaccgacctggacctggagatgctggccccctacatccccatggacgacgacttccagctgagatgatgatgaggactagtccctgttcccagagcccacttttttttctttttttgaaataaaatagcctgtctttcagatctcaaaggctcttttcagagccaccaaaaaaaaaaaaaaaaaaaaaaaaaaaaaaaaaaaaaaaaaaaaaaaaaaaaaaaaaaaaaaaaaaaaaaaaaaaaaaaaaaaaaaaaaaaaaaaaaaaaa

SEQ ID NO: 953 - RNA, 902 nt, synthetic construct
  misc_feature 1..902: note Artificial____CBFbeta(1-165)_Linker_HIF1alpha(549-575) mRNA opt4
  source 1..902: mol_type = other RNA
aggagagtcccgcagtcggcgtccagcggctctgcttgttcgtgtgtgtgtcgttgcaggccttattcaagcttaccatgcccagagtggtgcccgaccagagaagcaagttcgagaacgaggagttcttcagaaagctgagcagagagtgcgagatcaagtacaccggcttcagagacagaccccacgaggagagacaggccagattccagaacgcctgcagagacggcagaagcgagatcgccttcgtggccaccggcaccaacctgagcctgcagttcttccccgccagctggcagggcgagcagagacagacccccagcagagagtacgtggacctggagagagaggccggcaaggtgtacctgaaggcccccatgatcctgaacggcgtgtgcgtgatctggaagggctggatcgacctgcagagactggacggcatgggctgcctggagttcgacgaggagagagcccagcaggaggacgccctggcccagcaggccttcgaggaggccagaagaagaaccagagagttcgaggacagagacagaagccacagagaggagatggagggcggcagcggcggcagcggcggcagcggcggcagcggcggcggccccttcagcacccaggacaccgacctggacctggagatgctggccccctacatccccatggacgacgacttccagctgagatgatgatgaggactagtccctgttcccagagcccacttttttttctttttttgaaataaaatagcctgtctttcagatctcaaaggctcttttcagagccaccaaaaaaaaaaaaaaaaaaaaaaaaaaaaaaaaaaaaaaaaaaaaaaaaaaaaaaaaaaaaaaaaaaaaaaaaaaaaaaaaaaaaaaaaaaaaaaaaaaaaa

SEQ ID NO: 954 - RNA, 2537 nt, synthetic construct
  misc_feature 1..2537: note = Artificial____RUNX1(1-177)_N_RUNX1T1a(31-604) mRNA opt4
  source 1..2537: mol_type = other RNA
aggagagtcccgcagtcggcgtccagcggctctgcttgttcgtgtgtgtgtcgttgcaggccttattcaagcttaccatgagaatccccgtggacgccagcaccagcagaagattcaccccccccagcaccgccctgagccccggcaagatgagcgaggccctgcccctgggcgcccccgacgccggcgccgccctggccggcaagctgagaagcggcgacagaagcatggtggaggtgctggccgaccaccccggcgagctggtgagaaccgacagccccaacttcctgtgcagcgtgctgcccacccactggagatgcaacaagaccctgcccatcgccttcaaggtggtggccctgggcgacgtgcccgacggcaccctggtgaccgtgatggccggcaacgacgagaactacagcgccgagctgagaaacgccaccgccgccatgaagaaccaggtggccagattcaacgacctgagattcgtgggcagaagcggcagaggcaagagcttcaccctgaccatcaccgtgttcaccaaccccccccaggtggccacctaccacagagccatcaagatcaccgtggacggccccagagagcccagaaacagaaccgagaagcacagcaccatgcccgacagccccgtggacgtgaagacccagagcagactgaccccccccaccatgccccccccccccaccacccagggcgcccccagaaccagcagcttcacccccaccaccctgaccaacggcaccagccacagccccaccgccctgaacggcgcccccagcccccccaacggcttcagcaacggccccagcagcagcagcagcagcagcctggccaaccagcagctgccccccgcctgcggcgccagacagctgagcaagctgaagagattcctgaccaccctgcagcagttcggcaacgacatcagccccgagatcggcgagagagtgagaaccctggtgctgggcctggtgaacagcaccctgaccatcgaggagttccacagcaagctgcaggaggccaccaacttccccctgagacccttcgtgatccccttcctgaaggccaacctgcccctgctgcagagagagctgctgcactgcgccagactggccaagcagaaccccgcccagtacctggcccagcacgagcagctgctgctggacgccagcaccaccagccccgtggacagcagcgagctgctgctggacgtgaacgagaacggcaagagaagaacccccgacagaaccaaggagaacggcttcgacagagagcccctgcacagcgagcaccccagcaagagaccctgcaccatcagccccggccagagatacagccccaacaacggcctgagctaccagcccaacggcctgccccaccccacccccccccccccccagcactacagactggacgacatggccatcgcccaccactacagagacagctacagacaccccagccacagagacctgagagacagaaacagacccatgggcctgcacggcaccagacaggaggagatgatcgaccacagactgaccgacagagagtgggccgaggagtggaagcacctggaccacctgctgaactgcatcatggacatggtggagaagaccagaagaagcctgaccgtgctgagaagatgccaggaggccgacagagaggagctgaactactggatcagaagatacagcgacgccgaggacctgaagaagggcggcggcagcagcagcagccacagcagacagcagagccccgtgaaccccgaccccgtggccctggacgcccacagagagttcctgcacagacccgccagcggctacgtgcccgaggagatctggaagaaggccgaggaggccgtgaacgaggtgaagagacaggccatgaccgagctgcagaaggccgtgagcgaggccgagagaaaggcccacgacatgatcaccaccgagagagccaagatggagagaaccgtggccgaggccaagagacaggccgccgaggacgccctggccgtgatcaaccagcaggaggacagcagcgagagctgctggaactgcggcagaaaggccagcgagacctgcagcggctgcaacaccgccagatactgcggcagcttctgccagcacaaggactgggagaagcaccaccacatctgcggccagaccctgcaggcccagcagcagggcgacacccccgccgtgagcagcagcgtgacccccaacagcggcgccggcagccccatggacaccccccccgccgccacccccagaagcaccacccccggcacccccagcaccatcgagaccacccccagatgatgatgaggactagtccctgttcccagagcccacttttttttctttttttgaaataaaatagcctgtctttcagatctcaaaggctcttttcagagccaccaaaaaaaaaaaaaaaaaaaaaaaaaaaaaaaaaaaaaaaaaaaaaaaaaaaaaaaaaaaaaaaaaaaaaaaaaaaaaaaaaaaaaaaaaaaaaaaaaaaaa

SEQ ID NO: 955 - RNA, 1052 nt, synthetic construct
  misc_feature 1..1052: note = Artificial____RUNX1(1-241)_RUNX1T1b(short) mRNA opt4
  source 1..1052: mol_type = other RNA
aggagagtcccgcagtcggcgtccagcggctctgcttgttcgtgtgtgtgtcgttgcaggccttattcaagcttaccatgagaatccccgtggacgccagcaccagcagaagattcaccccccccagcaccgccctgagccccggcaagatgagcgaggccctgcccctgggcgcccccgacgccggcgccgccctggccggcaagctgagaagcggcgacagaagcatggtggaggtgctggccgaccaccccggcgagctggtgagaaccgacagccccaacttcctgtgcagcgtgctgcccacccactggagatgcaacaagaccctgcccatcgccttcaaggtggtggccctgggcgacgtgcccgacggcaccctggtgaccgtgatggccggcaacgacgagaactacagcgccgagctgagaaacgccaccgccgccatgaagaaccaggtggccagattcaacgacctgagattcgtgggcagaagcggcagaggcaagagcttcaccctgaccatcaccgtgttcaccaaccccccccaggtggccacctaccacagagccatcaagatcaccgtggacggccccagagagcccagaagacacagacagaagctggacgaccagaccaagcccggcagcctgagcttcagcgagagactgagcgagctggagcagctgagaagaaccgccatgagagtgagcccccaccaccccgcccccacccccaaccccagagccagcctgaaccacagcaccgccttcaacccccagccccagagccagatgcaggaggtgggcttctgccacgtggcccaggtgggcctgaagctgctgggctgatgatgaggactagtccctgttcccagagcccacttttttttctttttttgaaataaaatagcctgtctttcagatctcaaaggctcttttcagagccaccaaaaaaaaaaaaaaaaaaaaaaaaaaaaaaaaaaaaaaaaaaaaaaaaaaaaaaaaaaaaaaaaaaaaaaaaaaaaaaaaaaaaaaaaaaaaaaaaaaaaa

SEQ ID NO: 956 - RNA, 2756 nt, synthetic construct
  misc_feature 1..2756: note = Artificial____RUNX1(1-241)_V_RUNX1T1b(22-604) mRNA opt4
  source 1..2756: mol_type = other RNA
aggagagtcccgcagtcggcgtccagcggctctgcttgttcgtgtgtgtgtcgttgcaggccttattcaagcttaccatgagaatccccgtggacgccagcaccagcagaagattcaccccccccagcaccgccctgagccccggcaagatgagcgaggccctgcccctgggcgcccccgacgccggcgccgccctggccggcaagctgagaagcggcgacagaagcatggtggaggtgctggccgaccaccccggcgagctggtgagaaccgacagccccaacttcctgtgcagcgtgctgcccacccactggagatgcaacaagaccctgcccatcgccttcaaggtggtggccctgggcgacgtgcccgacggcaccctggtgaccgtgatggccggcaacgacgagaactacagcgccgagctgagaaacgccaccgccgccatgaagaaccaggtggccagattcaacgacctgagattcgtgggcagaagcggcagaggcaagagcttcaccctgaccatcaccgtgttcaccaaccccccccaggtggccacctaccacagagccatcaagatcaccgtggacggccccagagagcccagaagacacagacagaagctggacgaccagaccaagcccggcagcctgagcttcagcgagagactgagcgagctggagcagctgagaagaaccgccatgagagtgagcccccaccaccccgcccccacccccaaccccagagccagcctgaaccacagcaccgccttcaacccccagccccagagccagatgcaggtgggccccgagaagagagtgcccgccatgcccggcagccccgtggaggtgaagatccagagcagaagcagcccccccaccatgccccccctgccccccatcaaccccggcggccccagacccgtgagcttcacccccaccgccctgagcaacggcatcaaccacagcccccccaccctgaacggcgcccccagccccccccagagattcagcaacggccccgccagcagcaccagcagcgccctgaccaaccagcagctgcccgccacctgcggcgccagacagctgagcaagctgaagagattcctgaccaccctgcagcagttcggcaacgacatcagccccgagatcggcgagaaggtgagaaccctggtgctggccctggtgaacagcaccgtgaccatcgaggagttccactgcaagctgcaggaggccaccaacttccccctgagacccttcgtgatccccttcctgaaggccaacctgcccctgctgcagagagagctgctgcactgcgccagagccgccaagcagacccccagccagtacctggcccagcacgagcacctgctgctgaacaccagcatcgccagccccgccgacagcagcgagctgctgatggaggtgcacggcaacggcaagagacccagccccgagagaagagaggagaacagcttcgacagagacaccatcgcccccgagccccccgccaagagagtgtgcaccatcagccccgcccccagacacagccccgccctgaccgtgcccctgatgaaccccggcggccagttccaccccacccccccccccctgcagcactacaccctggaggacatcgccaccagccacctgtacagagagcccaacaagatgctggagcacagagaggtgagagacagacaccacagcctgggcctgaacggcggctaccaggacgagctggtggaccacagactgaccgagagagagtgggccgacgagtggaagcacctggaccacgccctgaactgcatcatggagatggtggagaagaccagaagaagcatggccgtgctgagaagatgccaggagagcgacagagaggagctgaactactggaagagaagatacaacgagaacaccgagctgagaaagaccggcaccgagctggtgagcagacagcacagccccggcagcgccgacagcctgagcaacgacagccagagagagttcaacagcagacccggcaccggctacgtgcccgtggagttctggaagaagaccgaggaggccgtgaacaaggtgaagatccaggccatgagcgaggtgcagaaggccgtggccgaggccgagcagaaggccttcgaggtgatcgccaccgagagagccagaatggagcagaccatcgccgacgtgaagagacaggccgccgaggacgccttcctggtgatcaacgagcaggaggagagcaccgagaactgctggaactgcggcagaaaggccagcgagacctgcagcggctgcaacatcgccagatactgcggcagcttctgccagcacaaggactgggagagacaccacagactgtgcggccagaacctgcacggccagagcccccacggccagggcagacccctgctgcccgtgggcagaggcagcagcgccagaagcgccgactgcagcgtgcccagccccgccctggacaagaccagcgccaccaccagcagaagcagcacccccgccagcgtgaccgccatcgacaccaacggcctgtgatgatgaggactagtccctgttcccagagcccacttttttttctttttttgaaataaaatagcctgtctttcagatctcaaaggctcttttcagagccaccaaaaaaaaaaaaaaaaaaaaaaaaaaaaaaaaaaaaaaaaaaaaaaaaaaaaaaaaaaaaaaaaaaaaaaaaaaaaaaaaaaaaaaaaaaaaaaaaaaaaa

SEQ ID NO: 957 - RNA, 2756 nt, synthetic construct
  misc_feature 1..2756: note = Artificial____RUNX1(1-241)_I_RUNX1T1b(22-604) mRNA opt4
  source 1..2756: mol_type = other RNA
aggagagtcccgcagtcggcgtccagcggctctgcttgttcgtgtgtgtgtcgttgcaggccttattcaagcttaccatgagaatccccgtggacgccagcaccagcagaagattcaccccccccagcaccgccctgagccccggcaagatgagcgaggccctgcccctgggcgcccccgacgccggcgccgccctggccggcaagctgagaagcggcgacagaagcatggtggaggtgctggccgaccaccccggcgagctggtgagaaccgacagccccaacttcctgtgcagcgtgctgcccacccactggagatgcaacaagaccctgcccatcgccttcaaggtggtggccctgggcgacgtgcccgacggcaccctggtgaccgtgatggccggcaacgacgagaactacagcgccgagctgagaaacgccaccgccgccatgaagaaccaggtggccagattcaacgacctgagattcgtgggcagaagcggcagaggcaagagcttcaccctgaccatcaccgtgttcaccaaccccccccaggtggccacctaccacagagccatcaagatcaccgtggacggccccagagagcccagaagacacagacagaagctggacgaccagaccaagcccggcagcctgagcttcagcgagagactgagcgagctggagcagctgagaagaaccgccatgagagtgagcccccaccaccccgcccccacccccaaccccagagccagcctgaaccacagcaccgccttcaacccccagccccagagccagatgcagatcggccccgagaagagagtgcccgccatgcccggcagccccgtggaggtgaagatccagagcagaagcagcccccccaccatgccccccctgccccccatcaaccccggcggccccagacccgtgagcttcacccccaccgccctgagcaacggcatcaaccacagcccccccaccctgaacggcgcccccagccccccccagagattcagcaacggccccgccagcagcaccagcagcgccctgaccaaccagcagctgcccgccacctgcggcgccagacagctgagcaagctgaagagattcctgaccaccctgcagcagttcggcaacgacatcagccccgagatcggcgagaaggtgagaaccctggtgctggccctggtgaacagcaccgtgaccatcgaggagttccactgcaagctgcaggaggccaccaacttccccctgagacccttcgtgatccccttcctgaaggccaacctgcccctgctgcagagagagctgctgcactgcgccagagccgccaagcagacccccagccagtacctggcccagcacgagcacctgctgctgaacaccagcatcgccagccccgccgacagcagcgagctgctgatggaggtgcacggcaacggcaagagacccagccccgagagaagagaggagaacagcttcgacagagacaccatcgcccccgagccccccgccaagagagtgtgcaccatcagccccgcccccagacacagccccgccctgaccgtgcccctgatgaaccccggcggccagttccaccccacccccccccccctgcagcactacaccctggaggacatcgccaccagccacctgtacagagagcccaacaagatgctggagcacagagaggtgagagacagacaccacagcctgggcctgaacggcggctaccaggacgagctggtggaccacagactgaccgagagagagtgggccgacgagtggaagcacctggaccacgccctgaactgcatcatggagatggtggagaagaccagaagaagcatggccgtgctgagaagatgccaggagagcgacagagaggagctgaactactggaagagaagatacaacgagaacaccgagctgagaaagaccggcaccgagctggtgagcagacagcacagccccggcagcgccgacagcctgagcaacgacagccagagagagttcaacagcagacccggcaccggctacgtgcccgtggagttctggaagaagaccgaggaggccgtgaacaaggtgaagatccaggccatgagcgaggtgcagaaggccgtggccgaggccgagcagaaggccttcgaggtgatcgccaccgagagagccagaatggagcagaccatcgccgacgtgaagagacaggccgccgaggacgccttcctggtgatcaacgagcaggaggagagcaccgagaactgctggaactgcggcagaaaggccagcgagacctgcagcggctgcaacatcgccagatactgcggcagcttctgccagcacaaggactgggagagacaccacagactgtgcggccagaacctgcacggccagagcccccacggccagggcagacccctgctgcccgtgggcagaggcagcagcgccagaagcgccgactgcagcgtgcccagccccgccctggacaagaccagcgccaccaccagcagaagcagcacccccgccagcgtgaccgccatcgacaccaacggcctgtgatgatgaggactagtccctgttcccagagcccacttttttttctttttttgaaataaaatagcctgtctttcagatctcaaaggctcttttcagagccaccaaaaaaaaaaaaaaaaaaaaaaaaaaaaaaaaaaaaaaaaaaaaaaaaaaaaaaaaaaaaaaaaaaaaaaaaaaaaaaaaaaaaaaaaaaaaaaaaaaaaa

SEQ ID NO: 958 - RNA, 1640 nt, synthetic construct
  misc_feature 1..1640: note = Homo sapiens__Q01196-1__RUNX1(K83E_R174Q) mRNA opt5
  source 1..1640: mol_type = other RNA
aggagagtcccgcagtcggcgtccagcggctctgcttgttcgtgtgtgtgtcgttgcaggccttattcaagcttaccatgagaatccccgtggacgccagcacctcccggcgcttcacacctccgtctacggctctgagccccggcaagatgtccgaggccctccctctgggggcgcccgatgctggagccgcccttgctggcaaactgagatctggggaccggagcatggtcgaagttctcgccgatcaccctggagagctggtgcgcaccgactcccccaactttctttgctctgtgctgcctacacattggagatgtaatgaaaccctcccgattgctttcaaggtcgtggccctgggcgatgttcccgacgggacactggtgaccgtcatggcgggaaacgatgagaattacagcgccgaactccggaacgctacagccgctatgaaaaatcaggtggcccgctttaacgacctgagattcgttggccggtccggccgcggaaagagctttacccttacgatcaccgtgttcacaaatcctccccaagtcgcgacctatcacagagccattaaaatcacagtggatgggcctcaggagccccggcgccatagacagaagctggacgatcagaccaagccgggctctctctcctttagcgagcggctgtctgaacttgagcaactgcgcagaacggctatgcgggtgtcccctcaccatcccgcccctacacccaaccccagagctagcctcaatcactctaccgccttcaaccctcagccgcagtcccagatgcaagacacacgccagattcagcccagccctccctggtcctacgatcagtcttatcaatacctggggagcatcgcctcccctagcgtccaccccgctaccccgatctctcctggacgggcgtccggcatgaccacactgagcgccgaactctctagcagactgtccacggctcccgaccttaccgccttttctgaccctcgccagttccccgccctgcctagcatttccgatccccggatgcattatccgggggcttttacatacagccctacccccgttacatctggaatcggcattggcatgtccgccatggggagcgcgaccagatatcacacgtacctgccccctccgtaccccggatcttcccaggctcaaggcgggcctttccaggccagctccccctcttatcatctctactatggagccagcgctggctcctaccagttttctatggtcgggggagagcgcagccctccccggatccttcctccctgcacaaatgcctccaccggcagcgctctgctcaacccgtctctgcctaatcagtccgacgtggtggaggccgaaggcagccactctaactcccccaccaatatggcgcctagcgccagactggaggaagctgtgtggcgcccctattgatgatgaggactagtccctgttcccagagcccacttttttttctttttttgaaataaaatagcctgtctttcagatctcaaaggctcttttcagagccaccaaaaaaaaaaaaaaaaaaaaaaaaaaaaaaaaaaaaaaaaaaaaaaaaaaaaaaaaaaaaaaaaaaaaaaaaaaaaaaaaaaaaaaaaaaaaaaaaaaaaa

SEQ ID NO: 959 - RNA, 2114 nt, synthetic construct
  misc_feature 1..2114: note = Homo sapiens____CBFbeta(1-165)_SMMHC(1527-1972) mRNA opt5
  source 1..2114: mol_type = other RNA
aggagagtcccgcagtcggcgtccagcggctctgcttgttcgtgtgtgtgtcgttgcaggccttattcaagcttaccatgcccagagtggtccctgaccagcggagcaagttcgagaacgaagagtttttccgcaaactgtccagagaatgcgagatcaagtacaccggctttcgggatcgcccgcacgaagagagacaagcccggttccagaatgcttgtcgcgacgggagatctgagattgcctttgttgcgacaggaacgaacctcagcctgcagttctttcccgcttcctggcagggcgaacaacggcagaccccttctcgcgagtatgtggatcttgaaagagaggccgggaaagtgtacctgaaggcccccatgatcctcaatggagtctgcgtgatttggaaaggctggatcgacctgcagcggcttgatgggatgggatgtctggagttcgacgaggaacgcgctcagcaagaagatgccctcgctcagcaggcctttgaggaagcgagacggcgcacaagagagttcgaggaccgggatagaagccatcgcgaagagatggaagttcacgagctggaaaagtccaagcgggccctggagacccagatggaggaaatgaaaacacaactcgaggaactggaggacgaacttcaggctaccgaggatgccaagctgagactcgaggtgaacatgcaggctctgaaaggccaatttgaacgcgaccttcaggcccgggatgagcagaatgaagagaagagacgccagctgcaacggcagctccatgagtatgaaacagagctggaagacgagagaaaacagcgcgcgctggccgctgccgctaagaagaaactcgaaggcgacctgaaggatcttgagctgcaggccgactctgccattaaagggcgggaggaagctatcaagcaactcagaaaactgcaggcgcagatgaaggatttccagcgcgagcttgaagacgcccgggctagcagagatgagatctttgccaccgccaaagaaaacgagaagaaggctaaatccctggaggccgacctcatgcaactgcaggaagatctggcggctgccgagcgggcccgcaagcaggctgacctcgaaaaagaggaactggccgaggagcttgctagctctctgtccggaagaaatgccctccaggatgaaaagcggagactggaggcgcgcattgcccaacttgaagaggagctggaagaggaacagggcaacatggaggctatgagcgaccgggtcagaaaagccacgcagcaagctgaacagctctctaatgagctggccaccgagcgctccacagcgcagaagaacgaaagcgccagacagcaactggagcggcagaataaggaactccgctctaaactgcacgagatggaaggggctgtgaagtccaaattcaagagcaccatcgccgctcttgaggccaaaattgcccagctggaggaacaggttgagcaagaagctagagagaagcaggcggccacaaagtccctcaaacagaaggataaaaagctgaaagaaatcctgcttcaggtggaggacgagcggaagatggctgaacaatacaaggagcaggccgaaaaaggaaacgcccgcgtcaagcagctcaaaagacaactggaggaggctgaagaggaatctcagcggattaatgccaaccgcagaaagctgcagcgggagctcgacgaagcgaccgagagcaatgaggctatgggccgcgaagtgaacgccctgaaatccaaacttagacgggggaacgagacgagcttcgtgccttctagacgctccggaggccggagagtcatcgaaaatgccgatggcagcgaggaagagacagacacccgcgatgctgactttaacgggacaaaggcctctgagtgatgatgaggactagtccctgttcccagagcccacttttttttctttttttgaaataaaatagcctgtctttcagatctcaaaggctcttttcagagccaccaaaaaaaaaaaaaaaaaaaaaaaaaaaaaaaaaaaaaaaaaaaaaaaaaaaaaaaaaaaaaaaaaaaaaaaaaaaaaaaaaaaaaaaaaaaaaaaaaaaaa

SEQ ID NO: 960 - RNA, 1829 nt, synthetic construct
  misc_feature 1..1829: note = Artificial____CBFbeta(1-165)_SMMHC(1527-1877) mRNA opt5
  source 1..1829: mol_type = other RNA
aggagagtcccgcagtcggcgtccagcggctctgcttgttcgtgtgtgtgtcgttgcaggccttattcaagcttaccatgcccagagtggtccctgaccagcggagcaagttcgagaacgaagagtttttccgcaaactgtccagagaatgcgagatcaagtacaccggctttcgggatcgcccgcacgaagagagacaagcccggttccagaatgcttgtcgcgacgggagatctgagattgcctttgttgcgacaggaacgaacctcagcctgcagttctttcccgcttcctggcagggcgaacaacggcagaccccttctcgcgagtatgtggatcttgaaagagaggccgggaaagtgtacctgaaggcccccatgatcctcaatggagtctgcgtgatttggaaaggctggatcgacctgcagcggcttgatgggatgggatgtctggagttcgacgaggaacgcgctcagcaagaagatgccctcgctcagcaggcctttgaggaagcgagacggcgcacaagagagttcgaggaccgggatagaagccatcgcgaagagatggaagttcacgagctggaaaagtccaagcgggccctggagacccagatggaggaaatgaaaacacaactcgaggaactggaggacgaacttcaggctaccgaggatgccaagctgagactcgaggtgaacatgcaggctctgaaaggccaatttgaacgcgaccttcaggcccgggatgagcagaatgaagagaagagacgccagctgcaacggcagctccatgagtatgaaacagagctggaagacgagagaaaacagcgcgcgctggccgctgccgctaagaagaaactcgaaggcgacctgaaggatcttgagctgcaggccgactctgccattaaagggcgggaggaagctatcaagcaactcagaaaactgcaggcgcagatgaaggatttccagcgcgagcttgaagacgcccgggctagcagagatgagatctttgccaccgccaaagaaaacgagaagaaggctaaatccctggaggccgacctcatgcaactgcaggaagatctggcggctgccgagcgggcccgcaagcaggctgacctcgaaaaagaggaactggccgaggagcttgctagctctctgtccggaagaaatgccctccaggatgaaaagcggagactggaggcgcgcattgcccaacttgaagaggagctggaagaggaacagggcaacatggaggctatgagcgaccgggtcagaaaagccacgcagcaagctgaacagctctctaatgagctggccaccgagcgctccacagcgcagaagaacgaaagcgccagacagcaactggagcggcagaataaggaactccgctctaaactgcacgagatggaaggggctgtgaagtccaaattcaagagcaccatcgccgctcttgaggccaaaattgcccagctggaggaacaggttgagcaagaagctagagagaagcaggcggccacaaagtccctcaaacagaaggataaaaagctgaaagaaatcctgcttcaggtggaggacgagcggaagatggctgaacaatacaaggagcaggccgaaaaaggaaacgcctgatgatgaggactagtccctgttcccagagcccacttttttttctttttttgaaataaaatagcctgtctttcagatctcaaaggctcttttcagagccaccaaaaaaaaaaaaaaaaaaaaaaaaaaaaaaaaaaaaaaaaaaaaaaaaaaaaaaaaaaaaaaaaaaaaaaaaaaaaaaaaaaaaaaaaaaaaaaaaaaaaa

SEQ ID NO: 961 - RNA, 890 nt, synthetic construct
  misc_feature 1..890: note = Artificial____CBFbeta(1-165)_Linker_Lifeact mRNA opt5
  source 1..890: mol_type = other RNA
aggagagtcccgcagtcggcgtccagcggctctgcttgttcgtgtgtgtgtcgttgcaggccttattcaagcttaccatgcccagagtggtccctgaccagcggagcaagttcgagaacgaagagtttttccgcaaactgtccagagaatgcgagatcaagtacaccggctttcgggatcgcccgcacgaagagagacaagcccggttccagaatgcttgtcgcgacgggagatctgagattgcctttgttgcgacaggaacgaacctcagcctgcagttctttcccgcttcctggcagggcgaacaacggcagaccccttctcgcgagtatgtggatcttgaaagagaggccgggaaagtgtacctgaaggcccccatgatcctcaatggagtctgcgtgatttggaaaggctggatcgacctgcagcggcttgatgggatgggatgtctggagttcgacgaggaacgcgctcagcaagaagatgccctcgctcagcaggcctttgaggaagcgagacggcgcacaagagagttcgaggaccgggatagaagccatcgcgaagagatggaaggcggctccgggggatctggcgggagcggaggctccgggggaggcggcgttgccgacctgattaagaagtttgagagcatctctaaagaagagggggatcctcccgtggctacctgatgatgaggactagtccctgttcccagagcccacttttttttctttttttgaaataaaatagcctgtctttcagatctcaaaggctcttttcagagccaccaaaaaaaaaaaaaaaaaaaaaaaaaaaaaaaaaaaaaaaaaaaaaaaaaaaaaaaaaaaaaaaaaaaaaaaaaaaaaaaaaaaaaaaaaaaaaaaaaaaaa

SEQ ID NO: 962 - RNA, 857 nt, synthetic construct
  misc_feature 1..857: note = Artificial____CBFbeta(1-165)_HIF1alpha(549-575) mRNA opt5
  source 1..857: mol_type = other RNA
aggagagtcccgcagtcggcgtccagcggctctgcttgttcgtgtgtgtgtcgttgcaggccttattcaagcttaccatgcccagagtggtccctgaccagcggagcaagttcgagaacgaagagtttttccgcaaactgtccagagaatgcgagatcaagtacaccggctttcgggatcgcccgcacgaagagagacaagcccggttccagaatgcttgtcgcgacgggagatctgagattgcctttgttgcgacaggaacgaacctcagcctgcagttctttcccgcttcctggcagggcgaacaacggcagaccccttctcgcgagtatgtggatcttgaaagagaggccgggaaagtgtacctgaaggcccccatgatcctcaatggagtctgcgtgatttggaaaggctggatcgacctgcagcggcttgatgggatgggatgtctggagttcgacgaggaacgcgctcagcaagaagatgccctcgctcagcaggcctttgaggaagcgagacggcgcacaagagagttcgaggaccgggatagaagccatcgcgaagagatggaacctttttccacccaggacacagatctggacctggagatgctcgccccctatattcctatggatgacgacttccaactgcggtgatgatgaggactagtccctgttcccagagcccacttttttttctttttttgaaataaaatagcctgtctttcagatctcaaaggctcttttcagagccaccaaaaaaaaaaaaaaaaaaaaaaaaaaaaaaaaaaaaaaaaaaaaaaaaaaaaaaaaaaaaaaaaaaaaaaaaaaaaaaaaaaaaaaaaaaaaaaaaaaaaa

SEQ ID NO: 963 - RNA, 902 nt, synthetic construct
  misc_feature 1..902: note Artificial____CBFbeta(1-165)_Linker_HIF1alpha(549-575) mRNA opt5
  source 1..902: mol_type = other RNA
aggagagtcccgcagtcggcgtccagcggctctgcttgttcgtgtgtgtgtcgttgcaggccttattcaagcttaccatgcccagagtggtccctgaccagcggagcaagttcgagaacgaagagtttttccgcaaactgtccagagaatgcgagatcaagtacaccggctttcgggatcgcccgcacgaagagagacaagcccggttccagaatgcttgtcgcgacgggagatctgagattgcctttgttgcgacaggaacgaacctcagcctgcagttctttcccgcttcctggcagggcgaacaacggcagaccccttctcgcgagtatgtggatcttgaaagagaggccgggaaagtgtacctgaaggcccccatgatcctcaatggagtctgcgtgatttggaaaggctggatcgacctgcagcggcttgatgggatgggatgtctggagttcgacgaggaacgcgctcagcaagaagatgccctcgctcagcaggcctttgaggaagcgagacggcgcacaagagagttcgaggaccgggatagaagccatcgcgaagagatggaaggcggctccgggggatctggcgggagcggaggctccgggggaggcccttttagcacccaggacacagatctggacctggagatgctcgccccctatattcctatggatgacgacttccaactgcggtgatgatgaggactagtccctgttcccagagcccacttttttttctttttttgaaataaaatagcctgtctttcagatctcaaaggctcttttcagagccaccaaaaaaaaaaaaaaaaaaaaaaaaaaaaaaaaaaaaaaaaaaaaaaaaaaaaaaaaaaaaaaaaaaaaaaaaaaaaaaaaaaaaaaaaaaaaaaaaaaaaa

SEQ ID NO: 964 - RNA, 2537 nt, synthetic construct
  misc_feature 1..2537: note = Artificial____RUNX1(1-177)_N_RUNX1T1a(31-604) mRNA opt5
  source 1..2537: mol_type = other RNA
aggagagtcccgcagtcggcgtccagcggctctgcttgttcgtgtgtgtgtcgttgcaggccttattcaagcttaccatgagaatccccgtggacgccagcacctcccggcgcttcacacctccgtctacggctctgagccccggcaagatgtccgaggccctccctctgggggcgcccgatgctggagccgcccttgctggcaaactgagatctggggaccggagcatggtcgaagttctcgccgatcaccctggagagctggtgcgcaccgactcccccaactttctttgctctgtgctgcctacacattggagatgtaataagaccctcccgattgctttcaaagtcgtggccctgggcgatgttcccgacgggacactggtgaccgtcatggcgggaaacgatgaaaattacagcgccgagctccggaacgctacagccgctatgaagaatcaggtggcccgctttaacgacctgagattcgttggccggtccggccgcgggaaatcttttacccttacgatcaccgtgttcacaaatcctccccaagtcgcgacctatcacagagccattaagatcacagtggatggacctcgggaaccccgcaacagaaccgagaagcattctacgatgccggactcccctgtggatgtcaaaacacagagccggctgacaccccctaccatgccccctcccccgaccacccagggcgctccccgcacatcttcctttacgcctaccacactcaccaatgggacaagccactctcccaccgccctgaacggagctccttccccgcccaatggcttcagcaacgggccttcctctagctccagcagctcccttgccaatcagcaactgccccctgcctgcggagctagacagctcagcaagctgaaacggtttctgacgacactccagcagttcggcaacgacatttctcccgagatcggcgaaagagttcgcaccctggtgcttgggctggtgaatagcaccctcacaatcgaggaatttcattccaagctgcaagaggcgaccaacttccctcttcggccctttgtcattccgttcctgaaagccaacctccctctgctgcagagagagctcctgcactgtgctcgccttgccaagcagaatcccgcccagtacctggctcaacacgaacagctcctgcttgatgcctctacaacgagccccgtggactccagcgagctgctcctggacgttaacgaaaatggaaagcggagaacccctgatcgcacaaaagagaacggcttcgaccgggaaccgctgcattctgagcacccctccaagagaccttgcaccatcagccccgggcagcgctattctcctaataacggactctcctaccaacccaatggcctgcctcatcccacaccgcctccccctcagcactatcggcttgatgacatggcgattgctcaccattacagagatagctatcgccacccctcccatcgggacctgagagatcggaaccgcccgatggggctccacggaaccagacaggaggaaatgatcgaccatcggctgacggatagagagtgggccgaagagtggaaacacctggaccaccttctcaattgtattatggatatggtggaaaagacccgccggtctctgacagtcctgagacgctgccaggaggccgacagagaggaactcaactactggatccggcgctacagcgacgctgaggatctgaaaaagggcggcgggtcctctagctcccatagcagacaacagtctcctgtgaatcccgaccctgttgcccttgatgctcaccgggaatttctgcatcgccccgcctccggatatgtgcccgaggaaatttggaaaaaggcggaggaggccgtcaacgaagtgaagagacaggctatgaccgagctccagaaagccgtcagcgaagctgagcggaaggcccacgacatgatcacaaccgagcgcgcgaaaatggaaagaacggtggccgaggctaagcggcaagccgctgaagatgccctggccgttatcaatcagcaggaggactcttccgaaagctgttggaactgcggccgcaaagctagcgagacatgtagcgggtgcaataccgcgagatactgtggatccttctgccagcacaaggattgggagaagcatcaccatatttgcggccaaacactgcaggcccagcagcaaggggacacccctgctgtgtcttcttccgtcaccccgaacagcggcgccggatcccccatggatacacctcccgccgctacgcctcggtctaccacacccggcacccctagcacaatcgaaaccacgccgagatgatgatgaggactagtccctgttcccagagcccacttttttttctttttttgaaataaaatagcctgtctttcagatctcaaaggctcttttcagagccaccaaaaaaaaaaaaaaaaaaaaaaaaaaaaaaaaaaaaaaaaaaaaaaaaaaaaaaaaaaaaaaaaaaaaaaaaaaaaaaaaaaaaaaaaaaaaaaaaaaaaa

SEQ ID NO: 965 - RNA, 1052 nt, synthetic construct
  misc_feature 1..1052: note = Artificial____RUNX1(1-241)_RUNX1T1b(short) mRNA opt5
  source 1..1052: mol_type = other RNA
aggagagtcccgcagtcggcgtccagcggctctgcttgttcgtgtgtgtgtcgttgcaggccttattcaagcttaccatgagaatccccgtggacgccagcacctcccggcgcttcacacctccgtctacggctctgagccccggcaagatgtccgaggccctccctctgggggcgcccgatgctggagccgcccttgctggcaaactgagatctggggaccggagcatggtcgaagttctcgccgatcaccctggagagctggtgcgcaccgactcccccaactttctttgctctgtgctgcctacacattggagatgtaataagaccctcccgattgctttcaaagtcgtggccctgggcgatgttcccgacgggacactggtgaccgtcatggcgggaaacgatgaaaattacagcgccgagctccggaacgctacagccgctatgaagaatcaggtggcccgctttaacgacctgagattcgttggccggtccggccgcgggaaatcttttacccttacgatcaccgtgttcacaaatcctccccaagtcgcgacctatcacagagccattaagatcacagtggatggacctcgggaaccccgcagacatcggcagaagctggacgatcagaccaaaccgggcagcctctcctttagcgagcgcctgtctgagcttgaacagctgagacggacggctatgagagtgtcccctcaccatcccgcccctacacccaacccccgcgctagcctcaatcactctaccgccttcaaccctcaaccgcagtcccagatgcaggaggtcgggttttgccacgttgcccaagtgggactgaagctgctcggctgatgatgaggactagtccctgttcccagagcccacttttttttctttttttgaaataaaatagcctgtctttcagatctcaaaggctcttttcagagccaccaaaaaaaaaaaaaaaaaaaaaaaaaaaaaaaaaaaaaaaaaaaaaaaaaaaaaaaaaaaaaaaaaaaaaaaaaaaaaaaaaaaaaaaaaaaaaaaaaaaaa

SEQ ID NO: 966 - RNA, 2756 nt, synthetic construct
  misc_feature 1..2756: note = Artificial____RUNX1(1-241)_V_RUNX1T1b(22-604) mRNA opt5
  source 1..2756: mol_type = other RNA
aggagagtcccgcagtcggcgtccagcggctctgcttgttcgtgtgtgtgtcgttgcaggccttattcaagcttaccatgagaatccccgtggacgccagcacctcccggcgcttcacacctccgtctacggctctgagccccggcaagatgtccgaggccctccctctgggggcgcccgatgctggagccgcccttgctggcaaactgagatctggggaccggagcatggtcgaagttctcgccgatcaccctggagagctggtgcgcaccgactcccccaactttctttgctctgtgctgcctacacattggagatgtaataagaccctcccgattgctttcaaagtcgtggccctgggcgatgttcccgacgggacactggtgaccgtcatggcgggaaacgatgaaaattacagcgccgagctccggaacgctacagccgctatgaagaatcaggtggcccgctttaacgacctgagattcgttggccggtccggccgcgggaaatcttttacccttacgatcaccgtgttcacaaatcctccccaagtcgcgacctatcacagagccattaagatcacagtggatggacctcgggaaccccgcagacatcggcagaagctggacgatcagaccaaaccgggcagcctctcctttagcgagcgcctgtctgagcttgaacagctgagacggacggctatgagagtgtcccctcaccatcccgcccctacacccaacccccgcgctagcctcaatcactctaccgccttcaaccctcaaccgcagtcccagatgcaggtcgggcccgagaagcgggttcctgccatgcccggaagccctgtggaagtgaaaattcaatccagatctagccctccgacaatgcctcccctgcctcccatcaatcctggcgggccccgcccggtctcctttacccctaccgctctgagcaacggaatcaatcactctcctcccacactcaacggcgcgccctccccgccccagcggttcagcaatggccctgcctctagcacgtcctctgctctgaccaaccagcagcttcccgccacatgcggggccagacaactgagcaagctcaaacgctttctgaccacacttcagcagttcggaaacgacatttcccctgagatcggcgagaaggtgcggaccctggttctcgctctggtgaatagcacggtcacaattgaagagtttcattgtaagctgcaagaagccaccaacttccccctcagacctttcgtgatcccctttctgaaagcgaatcttccgctgctccagcgcgagctgcttcactgcgctcgggccgccaagcagaccccttctcagtacctggctcaacatgaacacctcctgctgaacacatccattgccagccccgctgattcttccgagctcctgatggaggttcacgggaatggaaaaagacctagccccgaacgccgggaggaaaactccttcgacagagacaccatcgccccggagcctcccgcgaagcgggtgtgtacaatttctcctgctccccgccatagccccgcccttacggtccctctgatgaatccgggcgggcagtttcaccccacccctccccctctccagcattatacactggaagatatcgccacctcccacctgtacagagagcccaacaaaatgcttgagcatcgggaagtgagagaccgccaccactctctcggactgaatggcggctatcaggatgagctggtcgaccatcggctcacagaaagagagtgggctgatgaatggaagcacctggaccatgcccttaactgcatcatggagatggtggagaaaacccgcagaagcatggcggttctgcggcgctgtcaagaatccgatagagaggaactcaattactggaagcggcgctataacgagaatacggagctgagaaagaccgggacagaactggtgagccggcagcactctcctggatccgccgacagcctttctaacgattcccagcgcgagttcaatagcagaccgggcaccgggtacgtccccgtggaattttggaaaaagacagaggaagctgttaacaaagtgaagattcaggccatgtctgaggtccaaaaagctgtggccgaggccgaacagaaggctttcgaggtgatcgcgaccgaacgggcccgcatggagcagacgattgctgacgttaagagacaggccgccgaagatgcttttctcgtcatcaacgagcaagaggaaagcacagagaattgctggaactgtggacggaaagcctccgaaacctgcagcggctgtaatattgcgagatactgcgggtctttctgccagcacaaggactgggagcgccatcaccggctgtgtggccagaacctgcatggacaatcccctcacggccaggggagacccctcctgcctgtgggacgcggcagctccgctcggtctgccgactgcagcgtgccctccccggcccttgataaaacatctgctaccaccagcagatcctctacacccgccagcgtcacggcgatcgacaccaatgggctgtgatgatgaggactagtccctgttcccagagcccacttttttttctttttttgaaataaaatagcctgtctttcagatctcaaaggctcttttcagagccaccaaaaaaaaaaaaaaaaaaaaaaaaaaaaaaaaaaaaaaaaaaaaaaaaaaaaaaaaaaaaaaaaaaaaaaaaaaaaaaaaaaaaaaaaaaaaaaaaaaaaa

SEQ ID NO: 967 - RNA, 2756 nt, synthetic construct
  misc_feature 1..2756: note = Artificial____RUNX1(1-241)_I_RUNX1T1b(22-604) mRNA opt5
  source 1..2756: mol_type = other RNA
aggagagtcccgcagtcggcgtccagcggctctgcttgttcgtgtgtgtgtcgttgcaggccttattcaagcttaccatgagaatccccgtggacgccagcacctcccggcgcttcacacctccgtctacggctctgagccccggcaagatgtccgaggccctccctctgggggcgcccgatgctggagccgcccttgctggcaaactgagatctggggaccggagcatggtcgaagttctcgccgatcaccctggagagctggtgcgcaccgactcccccaactttctttgctctgtgctgcctacacattggagatgtaataagaccctcccgattgctttcaaagtcgtggccctgggcgatgttcccgacgggacactggtgaccgtcatggcgggaaacgatgaaaattacagcgccgagctccggaacgctacagccgctatgaagaatcaggtggcccgctttaacgacctgagattcgttggccggtccggccgcgggaaatcttttacccttacgatcaccgtgttcacaaatcctccccaagtcgcgacctatcacagagccattaagatcacagtggatggacctcgggaaccccgcagacatcggcagaagctggacgatcagaccaaaccgggcagcctctcctttagcgagcgcctgtctgagcttgaacagctgagacggacggctatgagagtgtcccctcaccatcccgcccctacacccaacccccgcgctagcctcaatcactctaccgccttcaaccctcaaccgcagtcccagatgcagattgggcccgagaagcgggtccctgccatgcccggaagccctgttgaagtgaaaatccaatccagatctagccctccgacaatgcctcccctgcctcccatcaatcctggcgggccccgcccggtgtcctttacccctaccgctctgagcaacggaattaatcactctcctcccacactcaacggcgcgccctccccgccccagcggttcagcaatggccctgcctctagcacgtcctctgctctgaccaaccagcagcttcccgccacatgcggggccagacaactgagcaagctcaaacgctttctgaccacacttcagcagttcggaaacgacatctcccctgagattggcgagaaggtccggaccctggtgctcgctctggttaatagcacggtgacaatcgaagagtttcattgtaagctgcaagaagccaccaacttccccctcagacctttcgtcattccctttctgaaagcgaatcttccgctgctccagcgcgagctgcttcactgcgctcgggccgccaagcagaccccttctcagtacctggctcaacatgaacacctcctgctgaacacatccatcgccagccccgctgattcttccgagctcctgatggaggtgcacgggaatggaaaaagacctagccccgaacgccgggaggaaaactccttcgacagagacaccattgccccggagcctcccgcgaagcgggtttgtacaatctctcctgctccccgccatagccccgcccttacggtgcctctgatgaatccgggcgggcagtttcaccccacccctccccctctccagcattatacactggaagatatcgccacctcccacctgtacagagagcccaacaaaatgcttgagcatcgggaagtcagagaccgccaccactctctcggactgaatggcggctatcaggatgagctggtggaccatcggctcacagaaagagagtgggctgatgaatggaagcacctggaccatgcccttaactgcattatggagatggtcgagaaaacccgcagaagcatggcggtgctgcggcgctgtcaagaatccgatagagaggaactcaattactggaagcggcgctataacgagaatacggagctgagaaagaccgggacagaactggttagccggcagcactctcctggatccgccgacagcctttctaacgattcccagcgcgagttcaatagcagaccgggcaccgggtacgtgcccgtcgaattttggaaaaagacagaggaagctgtgaacaaagttaagatccaggccatgtctgaggtgcaaaaagctgtcgccgaggccgaacagaaggctttcgaggtgattgcgaccgaacgggcccgcatggagcagacgatcgctgacgtgaagagacaggccgccgaagatgcttttctcgttattaacgagcaagaggaaagcacagagaattgctggaactgtggacggaaagcctccgaaacctgcagcggctgtaatatcgcgagatactgcgggtctttctgccagcacaaggactgggagcgccatcaccggctgtgtggccagaacctgcatggacaatcccctcacggccaggggagacccctcctgcctgtcggacgcggcagctccgctcggtctgccgactgcagcgtgccctccccggcccttgataaaacatctgctaccaccagcagatcctctacacccgccagcgtgacggcgatcgacaccaatgggctgtgatgatgaggactagtccctgttcccagagcccacttttttttctttttttgaaataaaatagcctgtctttcagatctcaaaggctcttttcagagccaccaaaaaaaaaaaaaaaaaaaaaaaaaaaaaaaaaaaaaaaaaaaaaaaaaaaaaaaaaaaaaaaaaaaaaaaaaaaaaaaaaaaaaaaaaaaaaaaaaaaaa

SEQ ID NO: 968 - RNA, 1640 nt, synthetic construct
  misc_feature 1..1640: note = Homo sapiens__Q01196-1__RUNX1(K83E_R174Q) mRNA opt11
  source 1..1640: mol_type = other RNA
aggagagtcccgcagtcggcgtccagcggctctgcttgttcgtgtgtgtgtcgttgcaggccttattcaagcttaccatgcgcatcccagtagacgcctcaacctcacgtcgcttcacccctccctcaacagccctctcacccggcaaaatgtccgaagcattacccctcggtgcccccgacgcaggcgcagcactcgccggcaaacttcgatctggcgaccgatccatggtcgaagtcctagccgaccaccccggcgaactcgtacgaacagactcacccaatttcctctgctccgtcctccccactcactggcgctgcaacgaaaccctgcccattgccttcaaagtcgtcgcacttggcgacgtcccagacggcaccctagtaacagtaatggccggaaacgacgaaaactactcagcagaactacgcaacgccaccgccgccatgaaaaaccaagtagcccgcttcaacgatctacgattcgtcggccgatccggacgtggcaaatccttcactcttacaatcacagtcttcacaaatcccccacaagtcgccacctaccaccgcgccatcaaaattaccgttgacggcccccaagaaccaagacgccatcgtcaaaaacttgacgaccaaaccaaacccggctcactatcattctccgaacgcctctccgaactcgaacaactccgccgcaccgccatgcgcgtctcaccccaccaccccgctcccacaccaaaccccagggcctcccttaaccactccaccgcattcaacccccaaccacaatcccaaatgcaagacacacgacaaatacaaccatccccaccgtggtcatacgaccaatcttaccaatacctcggttctatagcctccccatccgtccacccagccacacccatctcccccggccgcgcatccggaatgaccacactctcagccgaactctcctcccgcctatcaaccgcccctgacctcaccgccttttccgacccccgacaattccccgcactaccgtcaatctccgacccccgaatgcactatcccggcgccttcacctactcccccacacctgtaacctccggcatcggcatcggcatgtccgccatgggaagcgccaccagatatcatacttacctacccccaccttatccaggatcctcacaagcccaaggcggcccttttcaagcctcctccccctcctaccatctctactacggcgcctccgccggctcctaccaattctccatggtcggcggcgaacgatcaccaccccgaatcctccctccctgcaccaacgcatcgaccggatcggccctcttaaacccctccctccccaaccaatcagacgtcgtcgaagccgaaggatctcactccaactcccccacaaacatggcaccttcagcccgcctcgaagaagccgtctggcgcccctactaatgatgaggactagtccctgttcccagagcccacttttttttctttttttgaaataaaatagcctgtctttcagatctcaaaggctcttttcagagccaccaaaaaaaaaaaaaaaaaaaaaaaaaaaaaaaaaaaaaaaaaaaaaaaaaaaaaaaaaaaaaaaaaaaaaaaaaaaaaaaaaaaaaaaaaaaaaaaaaaaaa

SEQ ID NO: 969 - RNA, 2114 nt, synthetic construct
  misc_feature 1..2114: note = Homo sapiens____CBFbeta(1-165)_SMMHC(1527-1972) mRNA opt11
  source 1..2114: mol_type = other RNA
aggagagtcccgcagtcggcgtccagcggctctgcttgttcgtgtgtgtgtcgttgcaggccttattcaagcttaccatgccaagggtggtgcccgaccagagaagcaagttcgaaaatgaggaatttttccggaagctgagcagggaatgcgagataaaatacacgggcttccgagacagaccacacgaagagaggcaagcgaggttccaaaacgcctgcagagacggaagaagcgagatagcgttcgtggccacggggacgaacctgagcctacagttcttccctgcaagctggcaaggagaacagaggcagacaccgagtagggagtacgtggacctggagagggaggcggggaaggtgtacctgaaggcaccaatgatactaaatggagtatgtgtaatctggaagggatggatagacctgcaacggctggacgggatgggatgcctggagttcgacgaggaaagagcgcagcaagaggacgcgctggcacaacaggcgttcgaggaagcaaggaggcggacgcgagagttcgaggacagggataggagccacagagaggagatggaggtacacgagctagagaaaagcaagagggcgctggaaacacaaatggaggagatgaagacacagctggaggagttggaagacgaactgcaagcgacagaggacgcaaagctgaggctggaagtcaacatgcaggcattaaagggacagttcgagagagacctgcaggcaagagacgagcagaacgaggaaaagaggaggcagctccaaaggcagctgcacgagtacgaaacggaactggaggacgagcgaaagcagagggcgctagcagcagcagcaaagaaaaagctggagggggacctgaaggacctggagttgcaggcagacagcgcaataaaagggagggaagaggcgatcaagcaactaagaaagctgcaggcacaaatgaaggatttccagagagagctagaggatgcaagggcaagccgggacgagatattcgcgacggcaaaagaaaacgagaaaaaggcgaaaagcctagaagcagacctgatgcagctacaggaggatttggcggcggcggagagggcaaggaaacaggcagatctggagaaggaggagctggcggaagagttggcaagtagcctaagcggaaggaatgcgctgcaggacgaaaagcggagactcgaggcgagaatagcacagctagaggaggaactggaggaggagcagggaaacatggaagcgatgagcgacagagtgagaaaggcgacgcaacaggcggaacagctaagcaacgagttagcaacggagagaagtacagcccaaaagaatgaaagtgcaaggcaacagctagagaggcagaacaaggaactgaggagcaagctgcacgagatggaaggagcagtgaaaagcaaattcaaaagcaccatcgcggcgctggaagcgaagatagcgcagctggaggagcaggtagaacaagaggcaagagagaagcaagcggcgacaaagagtctaaagcagaaagacaagaaactgaaagagatactgttacaagtggaggacgaaaggaagatggcagagcaatacaaggagcaggcggaaaaggggaacgcgagggtgaaacagttaaagaggcaactggaggaggcggaggaagagagccaaagaataaacgccaacagaaggaaactacagcgggaattggacgaggcaacagagagtaacgaagccatggggcgagaagtgaacgcactaaagagcaaactgaggcgggggaacgagacgagtttcgtaccgagcaggcggagcggagggagaagggtgatagagaatgcagacggcagcgaagaggaaacggacacgagagacgcagacttcaacgggacgaaggcgagcgaatagtgatgaggactagtccctgttcccagagcccacttttttttctttttttgaaataaaatagcctgtctttcagatctcaaaggctcttttcagagccaccaaaaaaaaaaaaaaaaaaaaaaaaaaaaaaaaaaaaaaaaaaaaaaaaaaaaaaaaaaaaaaaaaaaaaaaaaaaaaaaaaaaaaaaaaaaaaaaaaaaaa

SEQ ID NO: 970 - RNA, 1829 nt, synthetic construct
  misc_feature 1..1829: note = Artificial____CBFbeta(1-165)_SMMHC(1527-1877) mRNA opt11
  source 1..1829: mol_type = other RNA
aggagagtcccgcagtcggcgtccagcggctctgcttgttcgtgtgtgtgtcgttgcaggccttattcaagcttaccatgccgagggtggtgccagaccaaaggagcaagttcgagaacgaggaatttttcagaaagctgagcagagagtgcgagataaagtacacggggtttagagacagaccacacgaggagaggcaggcaaggttccagaacgcatgcagagacgggagaagcgagatagcattcgtagcgacaggaacaaacctaagcctacaatttttcccggcgagctggcagggagagcagagacagacgccaagcagggagtacgtggacctagagagggaagcaggaaaggtgtacctaaaggcaccaatgatactaaatggggtgtgcgtaatatggaaggggtggatagacctacagagactggacgggatgggatgcttggagttcgacgaagagagagcgcaacaggaggacgcactggcacaacaagcattcgaagaggcaaggaggaggacgagagagttcgaggacagagacaggagtcacagggaggaaatggaggtacacgaactagagaaaagcaagagggcgctggagacacagatggaagagatgaaaacgcaactggaggagctggaagacgagctgcaggcaacagaagatgcgaagctaaggctggaggtgaacatgcaggcactgaaaggacagttcgaaagggacctgcaggcgagggacgaacagaacgaggaaaagaggaggcagctccagaggcagctacacgagtacgagacggagttggaagacgagagaaagcaaagagcactagcggcggcggcgaagaaaaagctagagggagacctcaaagatctggagctacaggcagacagcgcgataaagggcagggaggaagcgataaagcagctaaggaagctgcaggcacagatgaaggacttccagagggagctcgaggacgcaagagcgagccgggacgagatattcgccacggcaaaggagaacgaaaagaaggcgaaaagcctggaggcggacctaatgcaactgcaagaagacctggcagcggcagagcgagcgaggaagcaggcagacctagagaaggaggagctggcggaagaactggcgagtagcctgagcggaaggaacgcactgcaggacgagaagaggaggctagaggcaagaatagcgcagctggaggaggagttggaggaggagcaggggaacatggaggcgatgagcgacagagtgagaaaggcgacacagcaagcagagcagttaagcaacgagctggcaacagagagaagcacggcgcaaaagaacgaatcagcgaggcaacagttggagaggcagaacaaggaactaagaagcaagctgcacgagatggagggcgcggtaaagagcaaattcaagtcaacaatagcggcgcttgaggcaaagatagcacagctggaagaacaagtagaacaggaggcgagagagaaacaagcagcgacaaagagcctgaaacagaaggacaagaagttaaaggagatactgctacaggtagaggacgaaagaaaaatggcggaacagtacaaagagcaggcagaaaaggggaacgcataatgatgaggactagtccctgttcccagagcccacttttttttctttttttgaaataaaatagcctgtctttcagatctcaaaggctcttttcagagccaccaaaaaaaaaaaaaaaaaaaaaaaaaaaaaaaaaaaaaaaaaaaaaaaaaaaaaaaaaaaaaaaaaaaaaaaaaaaaaaaaaaaaaaaaaaaaaaaaaaaaa

SEQ ID NO: 971 - RNA, 890 nt, synthetic construct
  misc_feature 1..890: note = Artificial____CBFbeta(1-165)_Linker_Lifeact mRNA opt11
  source 1..890: mol_type = other RNA
aggagagtcccgcagtcggcgtccagcggctctgcttgttcgtgtgtgtgtcgttgcaggccttattcaagcttaccatgccgcgcgtggtcccggaccagcgctcgaaatttgaaaatgaagagttctttcgcaagctctcgcgagagtgcgagataaagtacacgggctttcgcgatagaccgcacgaggaaaggcaagcgcgctttcaaaatgcctgtagagatggcaggagcgagatcgcgttcgtggccacgggcacgaacttgagcctgcaatttttcccggcctcgtggcagggcgagcagaggcaaacgccctcgcgcgagtacgtggacttggaaagggaagcgggcaaggtgtatctaaaggccccgatgatactaaatggagtgtgcgtgatctggaaagggtggatagacctgcaaaggctcgatggaatgggctgtctagagttcgatgaggaacgcgcgcaacaggaagacgcattggcacagcaagcgttcgaggaagcacgcaggagaacgcgcgagttcgaggacagggacaggagccatcgcgaggaaatggaagggggctcgggagggagcgggggctctggcgggagcgggggaggaggcgtggccgatctcatcaaaaagttcgagagcataagcaaagaagagggcgatcccccggtagcgacatagtgatgaggactagtccctgttcccagagcccacttttttttctttttttgaaataaaatagcctgtctttcagatctcaaaggctcttttcagagccaccaaaaaaaaaaaaaaaaaaaaaaaaaaaaaaaaaaaaaaaaaaaaaaaaaaaaaaaaaaaaaaaaaaaaaaaaaaaaaaaaaaaaaaaaaaaaaaaaaaaaa

SEQ ID NO: 972 - RNA, 857 nt, synthetic construct
  misc_feature 1..857: note = Artificial____CBFbeta(1-165)_HIF1alpha(549-575) mRNA opt11
  source 1..857: mol_type = other RNA
aggagagtcccgcagtcggcgtccagcggctctgcttgttcgtgtgtgtgtcgttgcaggccttattcaagcttaccatgccgcgcgtggtcccggaccagcgctcgaaatttgaaaatgaagagttctttcgaaagctctcgcgcgagtgcgagatcaaatacacgggcttccgcgatcgcccgcacgaggaaaggcaagcgcgctttcaaaatgcctgtcgcgatggcaggagcgagatcgcgttcgtggccacgggcacgaacctgagcctgcaatttttcccggcctcgtggcagggcgagcaaaggcaaacgccctcgcgcgagtacgtggacttggaaagggaagcgggcaaggtctatctcaaggccccgatgatactcaatggcgtgtgcgtgatctggaaagggtggatagacttgcaaaggctcgatggcatgggctgtctcgagttcgacgaggaacgcgcgcaacaggaagatgccctggcccagcaagcgttcgaggaagcgcgcaggcgcacgcgcgagttcgaggacagagacaggagccaccgagaggaaatggaaccgttctcgacccaggacacggacctggacttggaaatgctcgcgccctatatcccgatggatgacgatttccagctcaggtaatgatgaggactagtccctgttcccagagcccacttttttttctttttttgaaataaaatagcctgtctttcagatctcaaaggctcttttcagagccaccaaaaaaaaaaaaaaaaaaaaaaaaaaaaaaaaaaaaaaaaaaaaaaaaaaaaaaaaaaaaaaaaaaaaaaaaaaaaaaaaaaaaaaaaaaaaaaaaaaaaa

SEQ ID NO: 973 - RNA, 902 nt, synthetic construct
  misc_feature 1..902: note Artificial____CBFbeta(1-165)_Linker_HIF1alpha(549-575) mRNA opt11
  source 1..902: mol_type = other RNA
aggagagtcccgcagtcggcgtccagcggctctgcttgttcgtgtgtgtgtcgttgcaggccttattcaagcttaccatgccgcgcgtggtcccggaccagcgctcgaaatttgaaaatgaagagttctttcgaaagctatcgcgagagtgcgagatcaagtacacgggattccgcgatcgaccgcacgaggaaagacaagcgcgatttcaaaatgcatgtcgcgatggcaggagcgagatagcgttcgtggccacgggcacaaacttgagcttgcaattcttcccggcatcatggcagggcgagcaaaggcaaacaccctcgcgcgagtacgtggacttggaaagggaagcgggcaaggtctacctaaaggccccgatgatactcaatggagtgtgcgtgatctggaaagggtggatagacttacaaaggctcgatggcatgggatgtctcgagttcgatgaggaacgcgcgcaacaggaagatgccttggcacagcaagcgttcgaggaagcgcgcaggcgaacgcgcgagttcgaagacagagacaggagccatcgagaggaaatggaaggaggatcgggcggaagcgggggctcgggcgggagcgggggcggaccatttagcacgcaagataccgatctagatctcgagatgttggccccgtacatacccatggacgatgactttcaattgcgctagtgatgaggactagtccctgttcccagagcccacttttttttctttttttgaaataaaatagcctgtctttcagatctcaaaggctcttttcagagccaccaaaaaaaaaaaaaaaaaaaaaaaaaaaaaaaaaaaaaaaaaaaaaaaaaaaaaaaaaaaaaaaaaaaaaaaaaaaaaaaaaaaaaaaaaaaaaaaaaaaaa

SEQ ID NO: 974 - RNA, 2537 nt, synthetic construct
  misc_feature 1..2537: note = Artificial____RUNX1(1-177)_N_RUNX1T1a(31-604) mRNA opt11
  source 1..2537: mol_type = other RNA
aggagagtcccgcagtcggcgtccagcggctctgcttgttcgtgtgtgtgtcgttgcaggccttattcaagcttaccatgcgcataccagtagatgcctccacctctcgccgcttcacacctccctcgacagccctcagccccggaaaaatgtccgaagcgctcccacttggcgcacccgacgcaggcgctgccctcgccggaaaactccgtagtggtgaccgctctatggtggaagtcttagccgaccaccccggagaactcgtaagaacagactccccaaacttcctctgctccgtgctacctacacactggcgctgcaacaaaaccctcccgattgccttcaaagtcgtagccctaggcgacgtccccgacggaaccctcgtcaccgtcatggcaggcaatgatgaaaactactccgcagaactccgcaacgccaccgctgcaatgaaaaaccaagtcgcacgattcaatgacctcagattcgtagggcgctccggccgagggaaatcattcaccctcacaatcacagtcttcaccaaccctccacaagtcgcaacataccaccgcgccatcaaaatcacagtcgacggaccccgagaaccccgcaatagaactgagaaacacagcaccatgcccgattcgccagtcgatgtcaaaacccaatcaaggctcaccccgcccacaatgcccccacccccaaccacacagggcgcaccccgcacctcttcattcacccctacaacactaacaaatggcacatcccacagtccaaccgcccttaatggcgccccatccccaccaaacggtttctccaacggcccctcctcttcatcatcatcctccctggctaaccaacaactcccacccgcatgcggagcacgacaactcagcaaactaaaacgattcctcaccactcttcaacaattcggcaacgacatatccccagaaataggcgaacgagtccgaaccctagtcctcggtctagtcaattccacgctcactatagaggagttccactccaaactacaagaagctaccaacttcccactccgaccattcgtcattccattcctcaaggcaaacctccctctgctccaacgtgaactcctacactgcgccagactcgccaagcaaaaccccgcacaatatcttgcccaacacgaacaacttctcttagacgcctccaccacatctcccgtcgactcatctgaacttctcctagatgttaacgaaaacggcaaacgcagaactcccgaccgcaccaaagaaaacgggttcgatagagaaccactacacagcgaacacccctctaaacgcccatgcaccatatctcctggccaacggtactcacctaacaacggtctctcataccaacccaatggcctcccacaccccaccccaccacccccacaacactaccgacttgacgacatggcgatcgcacaccactacagagactcttataggcacccatcccaccgcgatctccgcgaccgcaatcgccccatgggactacacggcactcgccaagaagaaatgatcgaccaccgactaaccgaccgtgaatgggcagaagaatggaaacacctcgaccacctcctaaattgcatcatggacatggtcgagaaaacaaggcgctcactcacggttctccgtcgctgccaagaagcagatcgtgaagaactgaactattggattcgacgatactcagacgccgaagacctcaagaaaggcggaggctcatctagctcccatagtcgccaacaatcacccgtaaacccggacccagtagccctcgacgctcaccgagagttcctacaccgtcccgcctccggatacgtacccgaagaaatatggaagaaagctgaagaagcagtaaacgaagtcaaacgccaagctatgaccgaactacaaaaagccgtaagcgaagctgaacgcaaagcacacgacatgatcactaccgaacgcgcaaaaatggaacgaaccgtcgcagaagccaaacgccaggccgccgaagacgcccttgctgtcataaatcagcaagaagactcctccgaatcctgctggaactgtggccgcaaagccagcgaaacctgctccggttgcaataccgcccgctactgcggttcattctgccagcacaaagactgggaaaaacaccaccacatctgcggtcaaaccctgcaagctcaacaacaaggcgacacccctgccgtctcatccagcgtaacccccaacagcggcgccggctccccaatggacaccccacccgcagccacaccccgatcaacaacacccggaacaccctcgactatcgaaaccacaccccgttagtgatgaggactagtccctgttcccagagcccacttttttttctttttttgaaataaaatagcctgtctttcagatctcaaaggctcttttcagagccaccaaaaaaaaaaaaaaaaaaaaaaaaaaaaaaaaaaaaaaaaaaaaaaaaaaaaaaaaaaaaaaaaaaaaaaaaaaaaaaaaaaaaaaaaaaaaaaaaaaaaa

SEQ ID NO: 975 - RNA, 1052 nt, synthetic construct
  misc_feature 1..1052: note = Artificial____RUNX1(1-241)_RUNX1T1b(short) mRNA opt11
  source 1..1052: mol_type = other RNA
aggagagtcccgcagtcggcgtccagcggctctgcttgttcgtgtgtgtgtcgttgcaggccttattcaagcttaccatgcgcatcccagtcgacgcctccacctcccgccgcttcaccccaccctcaacagcactctcacccggcaaaatgtcagaagcactccctctcggagcacccgacgccggcgccgccctcgccggcaaactccgctcaggcgaccgatcaatggtcgaagtcctagccgaccaccccggagaactcgtccgcaccgactcacccaacttcctctgctccgtcctacccacccactggcgctgcaacaaaaccctccccatcgccttcaaagtcgtcgcactaggcgacgtcccagacggcaccctcgtcaccgtcatggccggcaacgacgaaaactactccgccgaactccgcaacgccacagcagccatgaaaaaccaagtcgcccgcttcaacgacctccgcttcgtaggccgctccggccgcggcaaatccttcaccctaaccatcacagtattcaccaatccaccccaagtcgccacctaccaccgcgctatcaaaatcaccgtcgacggcccccgcgaaccccgccgccaccgacaaaaactcgacgaccaaaccaaacccggctcactctccttctccgaacgcctctccgaactcgaacaactccgccgaacagccatgcgcgtctcaccccaccaccccgcccccacccccaacccccgagcctccctcaaccactcaaccgccttcaacccccaaccacaatcccaaatgcaagaagtcggcttctgccacgtagcccaagtcggtctcaaactcctcggctaatgatgaggactagtccctgttcccagagcccacttttttttctttttttgaaataaaatagcctgtctttcagatctcaaaggctcttttcagagccaccaaaaaaaaaaaaaaaaaaaaaaaaaaaaaaaaaaaaaaaaaaaaaaaaaaaaaaaaaaaaaaaaaaaaaaaaaaaaaaaaaaaaaaaaaaaaaaaaaaaaa

SEQ ID NO: 976 - RNA, 2756 nt, synthetic construct
  misc_feature 1..2756: note = Artificial____RUNX1(1-241)_V_RUNX1T1b(22-604) mRNA opt11
  source 1..2756: mol_type = other RNA
aggagagtcccgcagtcggcgtccagcggctctgcttgttcgtgtgtgtgtcgttgcaggccttattcaagcttaccatgcgcatccccgtggacgcctcaacaagccgacgcttcacgcccccatccaccgccctatcccccggcaaaatgtcagaagccctccccctcggagccccagacgcaggggccgcactcgcaggcaaacttcgatccggggacaggagcatggtcgaagtcctagccgaccaccccggagagctagtccgaaccgactcccccaacttcctgtgctccgtactgccaacccactggcgatgtaacaaaacactccctatagcttttaaagtagtggccctaggagacgttccagacggcaccctcgtcaccgtcatggccggcaacgacgaaaactacagcgccgaactacgcaacgcaactgccgccatgaaaaatcaagtggccagattcaacgacctccgcttcgtcggccgcagcggaagaggaaaatcgttcaccttaaccatcacagttttcacaaacccaccccaggttgcaacatatcaccgagccatcaaaatcactgttgacggcccacgtgaaccaagacggcatcgtcaaaaactagacgaccaaacaaaaccaggttcactctcattttcagaacgcctctcagaactcgaacaactacgacgaaccgctatgcgcgtctcaccccaccaccccgccccgaccccgaacccacgagcatctctgaaccacagcacagccttcaacccacaaccacagtcccaaatgcaagttggacccgagaaacgagtcccagctatgccgggcagccccgtcgaggtcaaaatccaatcgcgcagcagccctcccacaatgcccccactaccacccatcaacccaggcggtccccgccccgtctcattcaccccaacagccctctcaaatggaatcaaccacagccctcccaccctcaacggtgccccctccccaccacaacgcttttcaaacggaccagcgtcctccacctccagcgctctcactaaccaacaactcccagcaacttgcggagccagacaactcagcaaactaaaaagattcctcaccaccctacaacagttcggaaacgacatctcccccgaaataggcgagaaagttcgcactcttgtactagcccttgtaaactccacagtaactatcgaagagttccactgcaaactacaagaagcaaccaacttcccactccgccccttcgtgatcccattcctaaaagcaaacctaccactactccaacgcgaactgctccactgcgcccgtgccgcaaaacagactccctcacaatacctcgcccaacatgaacatcttctcctcaacacatcaattgctagcccagcagactcatccgaacttctcatggaagtccacggaaacggtaaacgaccatctcccgaacgacgcgaagaaaactccttcgaccgcgacaccatcgcccccgaaccacccgccaaacgcgtatgcacaatatcaccggccccgcgccactcccctgcacttaccgtaccccttatgaacccagggggccaattccaccctacacccccacccctgcagcactacactctagaagacattgcaacaagccacctataccgagaacctaacaaaatgctagaacacagagaagtgcgtgaccgccaccacagcctcggcttaaacgggggctaccaagacgaactcgttgatcaccgcctcaccgaacgagagtgggcagatgaatggaaacacctggaccacgccctaaactgcatcatggaaatggtcgagaaaaccagacgatcaatggccgtcctaagaaggtgccaagaatcagacagagaagaactcaactattggaaacgacgatataacgaaaacaccgaactcagaaaaacaggcactgaactcgtctcgagacaacactcaccaggctctgcagactctctttccaacgactcacaacgcgagttcaatagccgaccaggcaccggctacgtccccgtcgaattttggaagaaaaccgaagaagccgtaaacaaagtcaaaatacaagcaatgtccgaagtccaaaaagccgtcgccgaagcagaacaaaaagccttcgaggttatcgcgaccgaacgcgcccgtatggaacagacaatagccgacgtcaaacgacaggctgccgaagacgctttcctcgttatcaacgaacaagaagaatcaactgaaaactgctggaactgcggccggaaagcgtccgaaacctgctcaggctgcaacatcgctcgttattgcggctccttttgccaacataaagactgggagcgccaccaccgcctatgcggccaaaacctacacggccaaagcccccacggacaaggccgacctctcctacccgtaggccgaggctcctccgcacgctccgccgactgcagcgtccccagccccgcactcgacaaaacttcggcaaccacatcccgcagcagcacccccgcgagcgttacagccatcgacacaaacggactataatgatgaggactagtccctgttcccagagcccacttttttttctttttttgaaataaaatagcctgtctttcagatctcaaaggctcttttcagagccaccaaaaaaaaaaaaaaaaaaaaaaaaaaaaaaaaaaaaaaaaaaaaaaaaaaaaaaaaaaaaaaaaaaaaaaaaaaaaaaaaaaaaaaaaaaaaaaaaaaaaa

SEQ ID NO: 977 - RNA, 2756 nt, synthetic construct
  misc_feature 1..2756: note = Artificial____RUNX1(1-241)_I_RUNX1T1b(22-604) mRNA opt11
  source 1..2756: mol_type = other RNA
aggagagtcccgcagtcggcgtccagcggctctgcttgttcgtgtgtgtgtcgttgcaggccttattcaagcttaccatgaggatacccgtcgacgcctccacgtcacgccgcttcacacccccaagcaccgccctatcacccggcaaaatgtccgaagctctaccactaggtgcgccagacgcaggcgctgctctcgccggaaaactacgatccggggaccgatccatggtcgaagtcctcgctgatcaccccggcgaacttgtccgcacagactccccaaacttcctctgctccgtactcccgactcactggcgttgcaacaaaacacttcctattgcgttcaaggtcgtagccctaggggacgtccccgacggcaccttagtcacagtcatggcgggtaacgacgagaactactcagccgaattacgcaacgctacagcagccatgaaaaaccaggtagctcgcttcaacgacctccggttcgtcggtagaagcggccgaggaaaatcttttaccctcacaatcaccgtgttcaccaacccaccccaagtcgccacctaccaccgggcaatcaaaatcacagttgacggaccccgcgagccccgacgccatcgccaaaaacttgacgaccaaaccaaaccaggatcactatccttctcagagcgactctcagaactcgaacaattacgccggaccgcaatgcgtgtctcaccccaccacccggcccccacgcccaacccccgcgcctcactcaaccactccactgctttcaacccgcaaccccaatcccaaatgcagatcggcccagaaaaacgcgttcccgccatgccaggaagtcccgtcgaagtcaaaatccaatccagatcttccccaccaaccatgcctcccctcccgcccataaacccgggaggtccccgacccgtgtccttcacccccaccgccctctcgaacggcatcaaccactcaccacctaccctaaacggagcaccatccccaccccaacgcttctcaaacggacctgcatcctccacatcgtccgccctcaccaaccaacaactcccagccacatgcggcgcccgtcaactatctaagctaaaacgcttcctaaccactctccagcaatttggcaacgacatatcccccgaaatcggcgaaaaagtccgcacactcgtcttagccctcgtcaattccaccgtcaccatagaagagttccactgcaaactccaagaagccacaaacttcccactccgtccctttgtcatcccattcttaaaggcgaacctaccactactccaaagagaactactccactgcgctcgggccgcaaaacaaacccctagccagtacctagcccaacacgaacatctactactcaacactagcatcgcctcacccgcagactcatctgaactacttatggaagtccacggcaacggcaaacgcccctccccagaaaggcgcgaagaaaactccttcgatcgagacacaatagcacccgaaccacccgccaaacgcgtatgcaccatcagcccagcaccccgacactccccagccctcacggtccctctaatgaacccgggcggacaattccaccccaccccaccacccctacaacactacacattagaagacatagccacatctcacctctaccgcgaacccaataaaatgctggaacaccgcgaagtccgagatagacaccattctctaggactaaatggaggctaccaagacgaacttgtcgaccacagactcacagaacgcgaatgggccgacgaatggaagcacctcgatcatgcccttaactgtatcatggagatggtagagaaaacaagacgatccatggcagttctacgtcgatgccaagagagcgaccgcgaagaactcaactactggaaacgccgctacaacgaaaacacagaactacgaaaaaccggcaccgaactcgtctcccgtcagcactccccgggaagcgccgactcccttagcaacgactcacaacgcgagttcaactctcgccccggaacaggctacgttcctgtcgagttctggaagaaaactgaagaagccgtaaacaaagtcaaaatccaagccatgtcagaagtccaaaaagccgtagcagaagccgaacaaaaggctttcgaagtaattgcaaccgaacgcgcacgtatggaacaaaccatagcagatgtaaaaagacaagccgccgaagacgccttcctcgtcataaacgaacaagaagaatccaccgaaaactgttggaactgcggccgtaaagcctccgaaacatgttctggctgcaacattgcccgttactgtgggtccttctgccaacacaaagattgggaacgccaccaccgcctctgcggacaaaacctccacggccaaagcccccatggtcaaggtagaccactactacccgttggacgcggctccagcgcacgatcagccgactgctcagtgccatcccccgcccttgacaaaacctccgccacaacctcgcgatcatccacaccagcctcagtaacagccatagacaccaacgggctttgatgatgaggactagtccctgttcccagagcccacttttttttctttttttgaaataaaatagcctgtctttcagatctcaaaggctcttttcagagccaccaaaaaaaaaaaaaaaaaaaaaaaaaaaaaaaaaaaaaaaaaaaaaaaaaaaaaaaaaaaaaaaaaaaaaaaaaaaaaaaaaaaaaaaaaaaaaaaaaaaaa

SEQ ID NO: 978 - RNA, 1610 nt, synthetic construct
  misc_feature 1..1610: note = Homo sapiens__Q01196-1__RUNX1(K83E_R174Q) mRNA wt
  source 1..1610: mol_type = other RNA
aggagagtcccgcagtcggcgtccagcggctctgcttgttcgtgtgtgtgtcgttgcaggccttattcaagcttaccatgcgtatccccgtagatgccagcacgagccgccgcttcacgccgccttccaccgcgctgagcccaggcaagatgagcgaggcgttgccgctgggcgccccggacgccggcgctgccctggccggcaagctgaggagcggcgaccgcagcatggtggaggtgctggccgaccacccgggcgagctggtgcgcaccgacagccccaacttcctctgctccgtgctgcctacgcactggcgctgcaacgagaccctgcccatcgctttcaaggtggtggccctaggggatgttccagatggcactctggtcactgtgatggctggcaatgatgaaaactactcggctgagctgagaaatgctaccgcagccatgaagaaccaggttgcaagatttaatgacctcaggtttgtcggtcgaagtggaagagggaaaagcttcactctgaccatcactgtcttcacaaacccaccgcaagtcgccacctaccacagagccatcaaaatcacagtggatgggccccaggaacctcgaagacatcggcagaaactagatgatcagaccaagcccgggagcttgtccttttccgagcggctcagtgaactggagcagctgcggcgcacagccatgagggtcagcccacaccacccagcccccacgcccaaccctcgtgcctccctgaaccactccactgcctttaaccctcagcctcagagtcagatgcaggatacaaggcagatccaaccatccccaccgtggtcctacgatcagtcctaccaatacctgggatccattgcctctccttctgtgcacccagcaacgcccatttcacctggacgtgccagcggcatgacaaccctctctgcagaactttccagtcgactctcaacggcacccgacctgacagcgttcagcgacccgcgccagttccccgcgctgccctccatctccgacccccgcatgcactatccaggcgccttcacctactccccgacgccggtcacctcgggcatcggcatcggcatgtcggccatgggctcggccacgcgctaccacacctacctgccgccgccctaccccggctcgtcgcaagcgcagggaggcccgttccaagccagctcgccctcctaccacctgtactacggcgcctcggccggctcctaccagttctccatggtgggcggcgagcgctcgccgccgcgcatcctgccgccctgcaccaacgcctccaccggctccgcgctgctcaaccccagcctcccgaaccagagcgacgtggtggaggccgagggcagccacagcaactcccccaccaacatggcgccctccgcgcgcctggaggaggccgtgtggaggccctactgaggactagtccctgttcccagagcccacttttttttctttttttgaaataaaatagcctgtctttcagatctaaaaaaaaaaaaaaaaaaaaaaaaaaaaaaaaaaaaaaaaaaaaaaaaaaaaaaaaaaaaaaaaaaaaaaaaaaaaaaaaaaaaaaaaaaaaaaaaaaaa

SEQ ID NO: 979 - RNA, 2084 nt, synthetic construct
  misc_feature 1..2084: note = Homo sapiens____CBFbeta(1-165)_SMMHC(1527-1972) mRNA wt
  source 1..2084: mol_type = other RNA
aggagagtcccgcagtcggcgtccagcggctctgcttgttcgtgtgtgtgtcgttgcaggccttattcaagcttaccatgccgcgcgtcgtgcccgaccagagaagcaagttcgagaacgaggagttttttaggaagctgagccgcgagtgtgagattaagtacacgggcttcagggaccggccccacgaggaacgccaggcacgcttccagaacgcctgccgcgacggccgctcggaaatcgcttttgtggccacaggaaccaatctgtctctccagttttttccggccagctggcagggagaacagcgacaaacacctagccgagagtatgtcgacttagaaagagaagcaggcaaggtatatttgaaggctcccatgattctgaatggagtctgtgttatctggaaaggctggattgatctccaaagactggatggtatgggctgtctggagtttgatgaggagcgagcccagcaggaggatgcattagcacaacaggcctttgaagaggctcggagaaggacacgcgaatttgaagatagagacaggtctcatcgggaggaaatggaggtccatgagctggagaagtccaagcgggccctggagacccagatggaggagatgaagacgcagctggaagagctggaggacgagctgcaagccacggaggacgccaaactgcggctggaagtcaacatgcaggcgctcaagggccagttcgaaagggatctccaagcccgggacgagcagaatgaggagaagaggaggcaactgcagagacagcttcacgagtatgagacggaactggaagacgagcgaaagcaacgtgccctggcagctgcagcaaagaagaagctggaaggggacctgaaagacctggagcttcaggccgactctgccatcaaggggagggaggaagccatcaagcagctacgcaaactgcaggctcagatgaaggactttcaaagagagctggaagatgcccgtgcctccagagatgagatctttgccacagccaaagagaatgagaagaaagccaagagcttggaagcagacctcatgcagctacaagaggacctcgccgccgctgagagggctcgcaaacaagcggacctcgagaaggaggaactggcagaggagctggccagtagcctgtcgggaaggaacgcactccaggacgagaagcgccgcctggaggcccggatcgcccagctggaggaggagctggaggaggagcagggcaacatggaggccatgagcgaccgggtccgcaaagccacacagcaggccgagcagctcagcaacgagctggccacagagcgcagcacggcccagaagaatgagagtgcccggcagcagctcgagcggcagaacaaggagctccggagcaagctccacgagatggagggggccgtcaagtccaagttcaagtccaccatcgcggcgctggaggccaagattgcacagctggaggagcaggtcgagcaggaggccagagagaaacaggcggccaccaagtcgctgaagcagaaagacaagaagctgaaggaaatcttgctgcaggtggaggacgagcgcaagatggccgagcagtacaaggagcaggcagagaaaggcaatgccagggtcaagcagctcaagaggcagctggaggaggcagaggaggagtcccagcgcatcaacgccaaccgcaggaagctgcagcgggagctggatgaggccacggagagcaacgaggccatgggccgcgaggtgaacgcactcaagagcaagctcaggcgaggaaacgagacctctttcgttccttctagaaggtctggaggacgtagagttattgaaaatgcagatggttctgaggaggaaacggacactcgagacgcagacttcaatggaaccaaggccagtgaatgaggactagtccctgttcccagagcccacttttttttctttttttgaaataaaatagcctgtctttcagatctaaaaaaaaaaaaaaaaaaaaaaaaaaaaaaaaaaaaaaaaaaaaaaaaaaaaaaaaaaaaaaaaaaaaaaaaaaaaaaaaaaaaaaaaaaaaaaaaaaaa

SEQ ID NO: 980 - RNA, 1799 nt, synthetic construct
  misc_feature 1..1799: note = Artificial____CBFbeta(1-165)_SMMHC(1527-1877) mRNA wt
  source 1..1799: mol_type = other RNA
aggagagtcccgcagtcggcgtccagcggctctgcttgttcgtgtgtgtgtcgttgcaggccttattcaagcttaccatgccgcgcgtcgtgcccgaccagagaagcaagttcgagaacgaggagttttttaggaagctgagccgcgagtgtgagattaagtacacgggcttcagggaccggccccacgaggaacgccaggcacgcttccagaacgcctgccgcgacggccgctcggaaatcgcttttgtggccacaggaaccaatctgtctctccagttttttccggccagctggcagggagaacagcgacaaacacctagccgagagtatgtcgacttagaaagagaagcaggcaaggtatatttgaaggctcccatgattctgaatggagtctgtgttatctggaaaggctggattgatctccaaagactggatggtatgggctgtctggagtttgatgaggagcgagcccagcaggaggatgcattagcacaacaggcctttgaagaggctcggagaaggacacgcgaatttgaagatagagacaggtctcatcgggaggaaatggaggtccatgagctggagaagtccaagcgggccctggagacccagatggaggagatgaagacgcagctggaagagctggaggacgagctgcaagccacggaggacgccaaactgcggctggaagtcaacatgcaggcgctcaagggccagttcgaaagggatctccaagcccgggacgagcagaatgaggagaagaggaggcaactgcagagacagcttcacgagtatgagacggaactggaagacgagcgaaagcaacgtgccctggcagctgcagcaaagaagaagctggaaggggacctgaaagacctggagcttcaggccgactctgccatcaaggggagggaggaagccatcaagcagctacgcaaactgcaggctcagatgaaggactttcaaagagagctggaagatgcccgtgcctccagagatgagatctttgccacagccaaagagaatgagaagaaagccaagagcttggaagcagacctcatgcagctacaagaggacctcgccgccgctgagagggctcgcaaacaagcggacctcgagaaggaggaactggcagaggagctggccagtagcctgtcgggaaggaacgcactccaggacgagaagcgccgcctggaggcccggatcgcccagctggaggaggagctggaggaggagcagggcaacatggaggccatgagcgaccgggtccgcaaagccacacagcaggccgagcagctcagcaacgagctggccacagagcgcagcacggcccagaagaatgagagtgcccggcagcagctcgagcggcagaacaaggagctccggagcaagctccacgagatggagggggccgtcaagtccaagttcaagtccaccatcgcggcgctggaggccaagattgcacagctggaggagcaggtcgagcaggaggccagagagaaacaggcggccaccaagtcgctgaagcagaaagacaagaagctgaaggaaatcttgctgcaggtggaggacgagcgcaagatggccgagcagtacaaggagcaggcagagaaaggcaatgcctgaggactagtccctgttcccagagcccacttttttttctttttttgaaataaaatagcctgtctttcagatctaaaaaaaaaaaaaaaaaaaaaaaaaaaaaaaaaaaaaaaaaaaaaaaaaaaaaaaaaaaaaaaaaaaaaaaaaaaaaaaaaaaaaaaaaaaaaaaaaaaa

SEQ ID NO: 981 - RNA, 860 nt, synthetic construct
  misc_feature 1..860: note = Artificial____CBFbeta(1-165)_Linker_Lifeact mRNA wt
  source 1..860: mol_type = other RNA
aggagagtcccgcagtcggcgtccagcggctctgcttgttcgtgtgtgtgtcgttgcaggccttattcaagcttaccatgccgcgcgtcgtgcccgaccagagaagcaagttcgagaacgaggagttttttaggaagctgagccgcgagtgtgagattaagtacacgggcttcagggaccggccccacgaggaacgccaggcacgcttccagaacgcctgccgcgacggccgctcggaaatcgcttttgtggccacaggaaccaatctgtctctccagttttttccggccagctggcagggagaacagcgacaaacacctagccgagagtatgtcgacttagaaagagaagcaggcaaggtatatttgaaggctcccatgattctgaatggagtctgtgttatctggaaaggctggattgatctccaaagactggatggtatgggctgtctggagtttgatgaggagcgagcccagcaggaggatgcattagcacaacaggcctttgaagaggctcggagaaggacacgcgaatttgaagatagagacaggtctcatcgggaggaaatggagggcgggagcggcgggtccggcgggagcggcggctccgggggcgggggcgtggccgacctgatcaagaagttcgagagcatcagcaaggaggagggggatccaccggtcgccacctgaggactagtccctgttcccagagcccacttttttttctttttttgaaataaaatagcctgtctttcagatctaaaaaaaaaaaaaaaaaaaaaaaaaaaaaaaaaaaaaaaaaaaaaaaaaaaaaaaaaaaaaaaaaaaaaaaaaaaaaaaaaaaaaaaaaaaaaaaaaaaa

SEQ ID NO: 982 - RNA, 827 nt, synthetic construct
  misc_feature 1..827: note = Artificial____CBFbeta(1-165)_HIF1alpha(549-575) mRNA wt
  source 1..827: mol_type = other RNA
aggagagtcccgcagtcggcgtccagcggctctgcttgttcgtgtgtgtgtcgttgcaggccttattcaagcttaccatgccgcgcgtcgtgcccgaccagagaagcaagttcgagaacgaggagttttttaggaagctgagccgcgagtgtgagattaagtacacgggcttcagggaccggccccacgaggaacgccaggcacgcttccagaacgcctgccgcgacggccgctcggaaatcgcttttgtggccacaggaaccaatctgtctctccagttttttccggccagctggcagggagaacagcgacaaacacctagccgagagtatgtcgacttagaaagagaagcaggcaaggtatatttgaaggctcccatgattctgaatggagtctgtgttatctggaaaggctggattgatctccaaagactggatggtatgggctgtctggagtttgatgaggagcgagcccagcaggaggatgcattagcacaacaggcctttgaagaggctcggagaaggacacgcgaatttgaagatagagacaggtctcatcgggaggaaatggagccattttctactcaggacacagatttagacttggagatgttagctccctatatcccaatggatgatgacttccagttacgttgaggactagtccctgttcccagagcccacttttttttctttttttgaaataaaatagcctgtctttcagatctaaaaaaaaaaaaaaaaaaaaaaaaaaaaaaaaaaaaaaaaaaaaaaaaaaaaaaaaaaaaaaaaaaaaaaaaaaaaaaaaaaaaaaaaaaaaaaaaaaaa

SEQ ID NO: 983 - RNA, 872 nt, synthetic construct
  misc_feature 1..872: note Artificial____CBFbeta(1-165)_Linker_HIF1alpha(549-575) mRNA wt
  source 1..872: mol_type = other RNA
aggagagtcccgcagtcggcgtccagcggctctgcttgttcgtgtgtgtgtcgttgcaggccttattcaagcttaccatgccgcgcgtcgtgcccgaccagagaagcaagttcgagaacgaggagttttttaggaagctgagccgcgagtgtgagattaagtacacgggcttcagggaccggccccacgaggaacgccaggcacgcttccagaacgcctgccgcgacggccgctcggaaatcgcttttgtggccacaggaaccaatctgtctctccagttttttccggccagctggcagggagaacagcgacaaacacctagccgagagtatgtcgacttagaaagagaagcaggcaaggtatatttgaaggctcccatgattctgaatggagtctgtgttatctggaaaggctggattgatctccaaagactggatggtatgggctgtctggagtttgatgaggagcgagcccagcaggaggatgcattagcacaacaggcctttgaagaggctcggagaaggacacgcgaatttgaagatagagacaggtctcatcgggaggaaatggagggcgggagcggcgggtccggcgggagcggcggctccgggggcgggccattttctactcaggacacagatttagacttggagatgttagctccctatatcccaatggatgatgacttccagttacgttgaggactagtccctgttcccagagcccacttttttttctttttttgaaataaaatagcctgtctttcagatctaaaaaaaaaaaaaaaaaaaaaaaaaaaaaaaaaaaaaaaaaaaaaaaaaaaaaaaaaaaaaaaaaaaaaaaaaaaaaaaaaaaaaaaaaaaaaaaaaaaa

SEQ ID NO: 984 - RNA, 2507 nt, synthetic construct
  misc_feature 1..2507: note = Artificial____RUNX1(1-177)_N_RUNX1T1a(31-604) mRNA wt
  source 1..2507: mol_type = other RNA
aggagagtcccgcagtcggcgtccagcggctctgcttgttcgtgtgtgtgtcgttgcaggccttattcaagcttaccatgcgtatccccgtagatgccagcacgagccgccgcttcacgccgccttccaccgcgctgagcccaggcaagatgagcgaggcgttgccgctgggcgccccggacgccggcgctgccctggccggcaagctgaggagcggcgaccgcagcatggtggaggtgctggccgaccacccgggcgagctggtgcgcaccgacagccccaacttcctctgctccgtgctgcctacgcactggcgctgcaacaagaccctgcccatcgctttcaaggtggtggccctaggggatgttccagatggcactctggtcactgtgatggctggcaatgatgaaaactactcggctgagctgagaaatgctaccgcagccatgaagaaccaggttgcaagatttaatgacctcaggtttgtcggtcgaagtggaagagggaaaagcttcactctgaccatcactgtcttcacaaacccaccgcaagtcgccacctaccacagagccatcaaaatcacagtggatgggccccgagaacctcgaaaccgtactgagaagcactccacaatgccagactcacctgtggatgtgaagacgcaatctaggctgactcctccaacaatgccacctcccccaactactcaaggagctccaagaaccagttcatttacaccgacaacgttaactaatggcacgagccattctcctacagccttgaatggcgccccctcaccacccaatggcttcagcaatgggccttcctcttcttcctcctcctctctggctaatcaacagctgcccccagcctgtggtgccaggcaactcagcaagctgaaaaggttccttactaccctgcagcagtttggcaatgacatttcacccgagataggagaaagagttcgcaccctcgttctgggactagtgaactccactttgacaattgaagaatttcattccaaactgcaagaagctactaacttcccactgagaccttttgtcatcccatttttgaaggccaacttgcccctgctgcagcgtgagctcctccactgcgcaagactggccaaacagaaccctgcccagtacctcgcccagcatgaacagctgcttctggatgccagcaccacctcacctgttgactcctcagagctgcttctcgatgtgaacgaaaacgggaagaggcgaactccagacagaaccaaagaaaatggctttgacagagagcctttgcactcagaacatccaagcaagcgaccatgcactattagcccaggccagcggtacagtccaaataacggcttatcctaccagcccaatggcctgcctcaccctaccccacctccacctcagcattaccgtttggatgatatggccattgcccaccactacagggactcctatcgacaccccagccacagggacctcagggacagaaacagacctatggggttgcatggcacacgtcaagaagaaatgattgatcacagactaacagacagagaatgggcagaagagtggaaacatcttgaccatctgttaaactgcataatggacatggtagaaaaaacaaggcgatctctcaccgtactaaggcggtgtcaagaagcagaccgggaagaattgaattactggatccggcggtacagtgacgccgaggacttaaaaaaaggtggcggcagtagcagcagccactctaggcagcagagtcccgtcaacccagacccagttgcactagacgcgcatcgggaattccttcacaggcctgcgtctggatacgtgccagaggagatctggaagaaagctgaggaggccgtcaatgaggtgaagcgccaggcgatgacggagctgcagaaggccgtgtctgaggcggagcggaaagcccacgacatgatcacaacagagagggccaagatggagcgcacggtcgccgaggccaaacggcaggcggcggaggacgcactggcagttatcaatcagcaggaggattcaagcgagagttgctggaattgtggccgtaaagcgagtgaaacctgcagtggctgtaacacagcccgatactgtggctcattttgccagcacaaagactgggagaagcaccatcacatctgtggacagaccctgcaggcccagcagcagggagacacacctgcagtcagctcctctgtcacgcccaacagcggggctgggagcccgatggacacaccaccagcagccactccgaggtcaaccaccccgggaaccccttccaccatagagacaacccctcgctgaggactagtccctgttcccagagcccacttttttttctttttttgaaataaaatagcctgtctttcagatctaaaaaaaaaaaaaaaaaaaaaaaaaaaaaaaaaaaaaaaaaaaaaaaaaaaaaaaaaaaaaaaaaaaaaaaaaaaaaaaaaaaaaaaaaaaaaaaaaaaa

SEQ ID NO: 985 - RNA, 1022 nt, synthetic construct
  misc_feature 1..1022: note = Artificial____RUNX1(1-241)_RUNX1T1b(short) mRNA wt
  source 1..1022: mol_type = other RNA
aggagagtcccgcagtcggcgtccagcggctctgcttgttcgtgtgtgtgtcgttgcaggccttattcaagcttaccatgcgtatccccgtagatgccagcacgagccgccgcttcacgccgccttccaccgcgctgagcccaggcaagatgagcgaggcgttgccgctgggcgccccggacgccggcgctgccctggccggcaagctgaggagcggcgaccgcagcatggtggaggtgctggccgaccacccgggcgagctggtgcgcaccgacagccccaacttcctctgctccgtgctgcctacgcactggcgctgcaacaagaccctgcccatcgctttcaaggtggtggccctaggggatgttccagatggcactctggtcactgtgatggctggcaatgatgaaaactactcggctgagctgagaaatgctaccgcagccatgaagaaccaggttgcaagatttaatgacctcaggtttgtcggtcgaagtggaagagggaaaagcttcactctgaccatcactgtcttcacaaacccaccgcaagtcgccacctaccacagagccatcaaaatcacagtggatgggccccgagaacctcgaagacatcggcagaaactagatgatcagaccaagcccgggagcttgtccttttccgagcggctcagtgaactggagcagctgcggcgcacagccatgagggtcagcccacaccacccagcccccacgcccaaccctcgtgcctccctgaaccactccactgcctttaaccctcagcctcagagtcagatgcaggaggtgggcttctgccacgtcgcccaggtggggctgaagctcctgggctgaggactagtccctgttcccagagcccacttttttttctttttttgaaataaaatagcctgtctttcagatctaaaaaaaaaaaaaaaaaaaaaaaaaaaaaaaaaaaaaaaaaaaaaaaaaaaaaaaaaaaaaaaaaaaaaaaaaaaaaaaaaaaaaaaaaaaaaaaaaaaa

SEQ ID NO: 986 - RNA, 2726 nt, synthetic construct
  misc_feature 1..2726: note = Artificial____RUNX1(1-241)_V_RUNX1T1b(22-604) mRNA wt
  source 1..2726: mol_type = other RNA
aggagagtcccgcagtcggcgtccagcggctctgcttgttcgtgtgtgtgtcgttgcaggccttattcaagcttaccatgcgtatccccgtagatgccagcacgagccgccgcttcacgccgccttccaccgcgctgagcccaggcaagatgagcgaggcgttgccgctgggcgccccggacgccggcgctgccctggccggcaagctgaggagcggcgaccgcagcatggtggaggtgctggccgaccacccgggcgagctggtgcgcaccgacagccccaacttcctctgctccgtgctgcctacgcactggcgctgcaacaagaccctgcccatcgctttcaaggtggtggccctaggggatgttccagatggcactctggtcactgtgatggctggcaatgatgaaaactactcggctgagctgagaaatgctaccgcagccatgaagaaccaggttgcaagatttaatgacctcaggtttgtcggtcgaagtggaagagggaaaagcttcactctgaccatcactgtcttcacaaacccaccgcaagtcgccacctaccacagagccatcaaaatcacagtggatgggccccgagaacctcgaagacatcggcagaaactagatgatcagaccaagcccgggagcttgtccttttccgagcggctcagtgaactggagcagctgcggcgcacagccatgagggtcagcccacaccacccagcccccacgcccaaccctcgtgcctccctgaaccactccactgcctttaaccctcagcctcagagtcagatgcaggtgggtcctgagaaaagggtgccagcgatgcctggatcgcctgtggaagtgaagatacagtccagatcctcacctcccaccatgccacccctcccaccaataaatcctggaggaccgaggccagtgtccttcactcctactgcattaagcaatggcatcaaccattctcctcctaccctgaatggtgccccatcaccgccacagagattcagcaatggtcctgcctcctccacatcatctgcactcacaaatcagcaattgccagccacttgtggtgctcgacaactcagcaagttgaaacgctttcttaccactctgcaacagtttggcaatgacatctcccctgagattggggagaaggtgcggactcttgttcttgcactggtgaactcaacagtgacaattgaggaattccactgtaagctccaagaagccacaaactttccccttcgtccttttgtgattccatttctcaaggccaacctgcccctgctgcagcgggaactgctgcactgcgctcgggcggccaagcagaccccatcccagtacctggctcagcacgaacaccttctgctcaacacaagcattgcatcgcctgctgactcgtcagagttgctcatggaggtgcacggaaatgggaagaggcccagtccagagaggagagaagagaatagttttgatagagacacaattgctcctgagcctcctgccaagagagtatgtaccatcagccctgctcctcggcacagtcctgctctcactgtgcccctcatgaatcccgggggccaattccatcctacccctccacctcttcagcattacaccttagaggatattgcaacttctcacctgtatcgggaacccaacaagatgctagagcatcgagaagttcgtgatagacaccacagtcttggtctaaatggaggctatcaagatgagttggtagatcatcgtttgacagaaagggaatgggctgatgaatggaaacatcttgaccatgcgctgaattgcattatggaaatggtagagaaaacaaggcgctctatggcagttctgcggcgctgtcaggaatcagatcgtgaagaactcaactactggaaaagacggtacaatgaaaacacagagctgaggaaaacggggaccgagttggtctccaggcagcacagccctgggagtgcagattctctcagcaatgattctcagagagagttcaacagcaggccaggtacaggatacgtacctgtggagttttggaaaaaaacagaagaagctgtgaataaggtgaaaattcaggccatgtcagaagtacagaaggccgtcgctgaggcagagcagaaagcctttgaagtgattgcaacagagagagcacgaatggagcaaaccatagcggatgtcaagcggcaggccgcagaggatgctttcctcgtcatcaatgagcaagaggagtccacggagaactgctggaactgtggccgcaaagccagcgagacatgcagtggctgcaatatcgcgcgatactgtggctctttctgccagcacaaggactgggagcggcaccaccgcctctgtggtcagaacctgcatggccagagcccccacggccagggccggccgctgcttcctgtaggcaggggctcctctgccaggtccgccgactgcagcgtgcccagcccagccctcgacaagacctcggcaaccacatcgcgttcctcaacacctgcttctgtgacagctatcgacaccaacggactctgaggactagtccctgttcccagagcccacttttttttctttttttgaaataaaatagcctgtctttcagatctaaaaaaaaaaaaaaaaaaaaaaaaaaaaaaaaaaaaaaaaaaaaaaaaaaaaaaaaaaaaaaaaaaaaaaaaaaaaaaaaaaaaaaaaaaaaaaaaaaaa

SEQ ID NO: 987 - RNA, 2726 nt, synthetic construct
  misc_feature 1..2726: note = Artificial____RUNX1(1-241)_I_RUNX1T1b(22-604) mRNA wt
  source 1..2726: mol_type = other RNA
aggagagtcccgcagtcggcgtccagcggctctgcttgttcgtgtgtgtgtcgttgcaggccttattcaagcttaccatgcgtatccccgtagatgccagcacgagccgccgcttcacgccgccttccaccgcgctgagcccaggcaagatgagcgaggcgttgccgctgggcgccccggacgccggcgctgccctggccggcaagctgaggagcggcgaccgcagcatggtggaggtgctggccgaccacccgggcgagctggtgcgcaccgacagccccaacttcctctgctccgtgctgcctacgcactggcgctgcaacaagaccctgcccatcgctttcaaggtggtggccctaggggatgttccagatggcactctggtcactgtgatggctggcaatgatgaaaactactcggctgagctgagaaatgctaccgcagccatgaagaaccaggttgcaagatttaatgacctcaggtttgtcggtcgaagtggaagagggaaaagcttcactctgaccatcactgtcttcacaaacccaccgcaagtcgccacctaccacagagccatcaaaatcacagtggatgggccccgagaacctcgaagacatcggcagaaactagatgatcagaccaagcccgggagcttgtccttttccgagcggctcagtgaactggagcagctgcggcgcacagccatgagggtcagcccacaccacccagcccccacgcccaaccctcgtgcctccctgaaccactccactgcctttaaccctcagcctcagagtcagatgcagatcggtcctgagaaaagggtgccagcgatgcctggatcgcctgtggaagtgaagatacagtccagatcctcacctcccaccatgccacccctcccaccaataaatcctggaggaccgaggccagtgtccttcactcctactgcattaagcaatggcatcaaccattctcctcctaccctgaatggtgccccatcaccgccacagagattcagcaatggtcctgcctcctccacatcatctgcactcacaaatcagcaattgccagccacttgtggtgctcgacaactcagcaagttgaaacgctttcttaccactctgcaacagtttggcaatgacatctcccctgagattggggagaaggtgcggactcttgttcttgcactggtgaactcaacagtgacaattgaggaattccactgtaagctccaagaagccacaaactttccccttcgtccttttgtgattccatttctcaaggccaacctgcccctgctgcagcgggaactgctgcactgcgctcgggcggccaagcagaccccatcccagtacctggctcagcacgaacaccttctgctcaacacaagcattgcatcgcctgctgactcgtcagagttgctcatggaggtgcacggaaatgggaagaggcccagtccagagaggagagaagagaatagttttgatagagacacaattgctcctgagcctcctgccaagagagtatgtaccatcagccctgctcctcggcacagtcctgctctcactgtgcccctcatgaatcccgggggccaattccatcctacccctccacctcttcagcattacaccttagaggatattgcaacttctcacctgtatcgggaacccaacaagatgctagagcatcgagaagttcgtgatagacaccacagtcttggtctaaatggaggctatcaagatgagttggtagatcatcgtttgacagaaagggaatgggctgatgaatggaaacatcttgaccatgcgctgaattgcattatggaaatggtagagaaaacaaggcgctctatggcagttctgcggcgctgtcaggaatcagatcgtgaagaactcaactactggaaaagacggtacaatgaaaacacagagctgaggaaaacggggaccgagttggtctccaggcagcacagccctgggagtgcagattctctcagcaatgattctcagagagagttcaacagcaggccaggtacaggatacgtacctgtggagttttggaaaaaaacagaagaagctgtgaataaggtgaaaattcaggccatgtcagaagtacagaaggccgtcgctgaggcagagcagaaagcctttgaagtgattgcaacagagagagcacgaatggagcaaaccatagcggatgtcaagcggcaggccgcagaggatgctttcctcgtcatcaatgagcaagaggagtccacggagaactgctggaactgtggccgcaaagccagcgagacatgcagtggctgcaatatcgcgcgatactgtggctctttctgccagcacaaggactgggagcggcaccaccgcctctgtggtcagaacctgcatggccagagcccccacggccagggccggccgctgcttcctgtaggcaggggctcctctgccaggtccgccgactgcagcgtgcccagcccagccctcgacaagacctcggcaaccacatcgcgttcctcaacacctgcttctgtgacagctatcgacaccaacggactctgaggactagtccctgttcccagagcccacttttttttctttttttgaaataaaatagcctgtctttcagatctaaaaaaaaaaaaaaaaaaaaaaaaaaaaaaaaaaaaaaaaaaaaaaaaaaaaaaaaaaaaaaaaaaaaaaaaaaaaaaaaaaaaaaaaaaaaaaaaaaaa

SEQ ID NO: 988 - RNA, 1610 nt, synthetic construct
  misc_feature 1..1610: note = Homo sapiens__Q01196-1__RUNX1(K83E_R174Q) mRNA wt mod
  source 1..1610: mol_type = other RNA
aggagagtcccgcagtcggcgtccagcggctctgcttgttcgtgtgtgtgtcgttgcaggccttattcaagcttaccatgcgtatccccgtagatgccagcacgagccgccgcttcacgccgccttccaccgcgctgagcccaggcaagatgagcgaggcgttgccgctgggcgccccggacgccggcgctgccctggccggcaagctgaggagcggcgaccgcagcatggtggaggtgctggccgaccacccgggcgagctggtgcgcaccgacagccccaacttcctctgctccgtgctgcctacgcactggcgctgcaacgagaccctgcccatcgctttcaaggtggtggccctaggggatgttccagatggcactctggtcactgtgatggctggcaatgatgaaaactactcggctgagctgagaaatgctaccgcagccatgaagaaccaggttgcaagatttaatgacctcaggtttgtcggtcgaagtggaagagggaaaagtttcactctgaccatcactgtcttcacaaacccaccgcaagtcgccacctaccacagagccatcaaaatcacagtggatgggccccaggaacctcgaagacatcggcagaaactagatgatcagaccaagcccgggagcttgtccttttccgagcggctcagtgaactggagcagctgcggcgcacagccatgagggtcagcccacaccacccagcccccacgcccaaccctcgtgcctccctgaaccactccactgcctttaaccctcagcctcagagtcagatgcaggatacaaggcagatccaaccatccccaccgtggtcctacgatcagtcctaccaatacctgggatccattgcctctccttctgtgcacccagcaacgcccatttcacctggacgtgccagcggcatgacaaccctctctgcagaactttccagtcgactctcaacggcacccgacctgacagcgttcagcgacccgcgccagttccccgcgctgccctccatctccgacccccgcatgcactatccaggcgccttcacctactccccgacgccggtcacctcgggcatcggcatcggcatgtcggccatgggctcggccacgcgctaccacacctacctgccgccgccctaccccggctcgtcgcaagcgcagggaggcccgttccaagccagctcgccctcctaccacctgtactacggcgcctcggccggctcctaccagttctccatggtgggcggcgagcgctcgccgccgcgcatcctgccgccctgcaccaacgcctccaccggctccgcgctgctcaaccccagcctcccgaaccagagcgacgtggtggaggccgagggcagccacagcaactcccccaccaacatggcgccctccgcgcgcctggaggaggccgtgtggaggccctactgaggactagtccctgttcccagagcccacttttttttctttttttgaaataaaatagcctgtctttcagatctaaaaaaaaaaaaaaaaaaaaaaaaaaaaaaaaaaaaaaaaaaaaaaaaaaaaaaaaaaaaaaaaaaaaaaaaaaaaaaaaaaaaaaaaaaaaaaaaaaaa

SEQ ID NO: 989 - RNA, 2084 nt, synthetic construct
  misc_feature 1..2084: note = Homo sapiens____CBFbeta(1-165)_SMMHC(1527-1972) mRNA wt mod
  source 1..2084: mol_type = other RNA
aggagagtcccgcagtcggcgtccagcggctctgcttgttcgtgtgtgtgtcgttgcaggccttattcaagcttaccatgccgcgcgtcgtgcccgaccagagaagcaagtttgagaacgaggagttctttaggaagctgagccgcgagtgtgagattaagtacacgggctttagggaccggccccacgaggaacgccaggcacgcttccagaacgcctgccgcgacggccgctcggaaatcgcttttgtggccacaggaaccaatctgtctctccagttctttccggccagctggcagggagaacagcgacaaacacctagccgagagtatgtcgacttagaaagagaagcaggcaaggtatatttgaaggctcccatgattctgaatggagtctgtgttatctggaaaggctggattgatctccaaagactggatggtatgggctgtctggagtttgatgaggagcgagcccagcaggaggatgcattagcacaacaggcctttgaagaggctcggagaaggacacgcgaatttgaagatagagacaggtctcatcgggaggaaatggaggtccatgagctggagaagtccaagcgggccctggagacccagatggaggagatgaagacgcagctggaggaactggaggacgagctgcaagccacggaggacgccaaactgcggctggaagtcaacatgcaggcgctcaagggccagttcgaaagggatctccaagcccgggacgagcagaatgaggagaagaggaggcaactgcagagacagcttcacgagtatgagacggaactggaagacgagcgaaagcaacgtgccctggcagctgcagcaaagaagaagctggaaggggacctgaaagacctggagcttcaggccgactctgccatcaaggggagggaggaagccatcaagcagctacgcaaactgcaggctcagatgaaggactttcaaagagagctggaagatgcccgtgcctccagagatgagatctttgccacagccaaagagaatgagaagaaagccaagagcttggaagcagacctcatgcagctacaagaggacctcgccgccgctgagagggctcgcaaacaagcggacctcgagaaggaggaactggcagaggagctggccagtagcctgtcgggaaggaacgcactccaggacgagaagcgccgcctggaggcccggatcgcccagctggaggaggagctggaggaggagcagggcaacatggaggccatgagcgaccgggtccgcaaagccacacagcaggccgagcagctcagcaacgagctggccacagagcgcagcacggcccagaagaatgagagtgcccggcagcagctcgagcggcagaacaaggagctccggagcaagctccacgagatggagggggccgtcaagtccaagttcaagtccaccatcgcggcgctggaggccaagattgcacagctggaggagcaggtcgagcaggaggccagagagaaacaggcggccaccaagtcgctgaagcagaaagacaagaagctgaaggaaatcttgctccaggtggaggacgagcgcaagatggccgagcagtacaaggagcaggcagagaaaggcaatgccagggtcaagcagctgaagaggcagctggaggaggcagaggaggagtcccagcgcatcaacgccaaccgcaggaagctgcagcgggagctggatgaggccacggagagcaacgaggccatgggccgcgaggtgaacgcactcaagagcaagctcaggcgaggaaacgagacctctttcgttccttctagaaggtctggaggacgtagagttattgaaaatgcagatggttctgaggaggaaacggacactcgagacgcagacttcaatggaaccaaggccagtgaatgaggactagtccctgttcccagagcccacttttttttctttttttgaaataaaatagcctgtctttcagatctaaaaaaaaaaaaaaaaaaaaaaaaaaaaaaaaaaaaaaaaaaaaaaaaaaaaaaaaaaaaaaaaaaaaaaaaaaaaaaaaaaaaaaaaaaaaaaaaaaaa

SEQ ID NO: 990 - RNA, 1799 nt, synthetic construct
  misc_feature 1..1799: note = Artificial____CBFbeta(1-165)_SMMHC(1527-1877) mRNA wt mod
  source 1..1799: mol_type = other RNA
aggagagtcccgcagtcggcgtccagcggctctgcttgttcgtgtgtgtgtcgttgcaggccttattcaagcttaccatgccgcgcgtcgtgcccgaccagagaagcaagtttgagaacgaggagttctttaggaagctgagccgcgagtgtgagattaagtacacgggctttagggaccggccccacgaggaacgccaggcacgcttccagaacgcctgccgcgacggccgctcggaaatcgcttttgtggccacaggaaccaatctgtctctccagttctttccggccagctggcagggagaacagcgacaaacacctagccgagagtatgtcgacttagaaagagaagcaggcaaggtatatttgaaggctcccatgattctgaatggagtctgtgttatctggaaaggctggattgatctccaaagactggatggtatgggctgtctggagtttgatgaggagcgagcccagcaggaggatgcattagcacaacaggcctttgaagaggctcggagaaggacacgcgaatttgaagatagagacaggtctcatcgggaggaaatggaggtccatgagctggagaagtccaagcgggccctggagacccagatggaggagatgaagacgcagctggaggaactggaggacgagctgcaagccacggaggacgccaaactgcggctggaagtcaacatgcaggcgctcaagggccagttcgaaagggatctccaagcccgggacgagcagaatgaggagaagaggaggcaactgcagagacagcttcacgagtatgagacggaactggaagacgagcgaaagcaacgtgccctggcagctgcagcaaagaagaagctggaaggggacctgaaagacctggagcttcaggccgactctgccatcaaggggagggaggaagccatcaagcagctacgcaaactgcaggctcagatgaaggactttcaaagagagctggaagatgcccgtgcctccagagatgagatctttgccacagccaaagagaatgagaagaaagccaagagcttggaagcagacctcatgcagctacaagaggacctcgccgccgctgagagggctcgcaaacaagcggacctcgagaaggaggaactggcagaggagctggccagtagcctgtcgggaaggaacgcactccaggacgagaagcgccgcctggaggcccggatcgcccagctggaggaggagctggaggaggagcagggcaacatggaggccatgagcgaccgggtccgcaaagccacacagcaggccgagcagctcagcaacgagctggccacagagcgcagcacggcccagaagaatgagagtgcccggcagcagctcgagcggcagaacaaggagctccggagcaagctccacgagatggagggggccgtcaagtccaagttcaagtccaccatcgcggcgctggaggccaagattgcacagctggaggagcaggtcgagcaggaggccagagagaaacaggcggccaccaagtcgctgaagcagaaagacaagaagctgaaggaaatcttgctccaggtggaggacgagcgcaagatggccgagcagtacaaggagcaggcagagaaaggcaatgcctgaggactagtccctgttcccagagcccacttttttttctttttttgaaataaaatagcctgtctttcagatctaaaaaaaaaaaaaaaaaaaaaaaaaaaaaaaaaaaaaaaaaaaaaaaaaaaaaaaaaaaaaaaaaaaaaaaaaaaaaaaaaaaaaaaaaaaaaaaaaaaa

SEQ ID NO: 991 - RNA, 860 nt, synthetic construct
  misc_feature 1..860: note = Artificial____CBFbeta(1-165)_Linker_Lifeact mRNA wt mod
  source 1..860: mol_type = other RNA
aggagagtcccgcagtcggcgtccagcggctctgcttgttcgtgtgtgtgtcgttgcaggccttattcaagcttaccatgccgcgcgtcgtgcccgaccagagaagcaagtttgagaacgaggagttctttaggaagctgagccgcgagtgtgagattaagtacacgggctttagggaccggccccacgaggaacgccaggcacgcttccagaacgcctgccgcgacggccgctcggaaatcgcttttgtggccacaggaaccaatctgtctctccagttctttccggccagctggcagggagaacagcgacaaacacctagccgagagtatgtcgacttagaaagagaagcaggcaaggtatatttgaaggctcccatgattctgaatggagtctgtgttatctggaaaggctggattgatctccaaagactggatggtatgggctgtctggagtttgatgaggagcgagcccagcaggaggatgcattagcacaacaggcctttgaagaggctcggagaaggacacgcgaatttgaagatagagacaggtctcatcgggaggaaatggagggcgggagcggcgggtccggcgggagcggcggctccgggggcgggggcgtggccgacctgatcaagaagttcgagagcatctccaaggaggagggggacccgcccgtcgccacctgaggactagtccctgttcccagagcccacttttttttctttttttgaaataaaatagcctgtctttcagatctaaaaaaaaaaaaaaaaaaaaaaaaaaaaaaaaaaaaaaaaaaaaaaaaaaaaaaaaaaaaaaaaaaaaaaaaaaaaaaaaaaaaaaaaaaaaaaaaaaaa

SEQ ID NO: 992 - RNA, 827 nt, synthetic construct
  misc_feature 1..827: note = Artificial____CBFbeta(1-165)_HIF1alpha(549-575) mRNA wt mod
  source 1..827: mol_type = other RNA
aggagagtcccgcagtcggcgtccagcggctctgcttgttcgtgtgtgtgtcgttgcaggccttattcaagcttaccatgccgcgcgtcgtgcccgaccagagaagcaagtttgagaacgaggagttctttaggaagctgagccgcgagtgtgagattaagtacacgggctttagggaccggccccacgaggaacgccaggcacgcttccagaacgcctgccgcgacggccgctcggaaatcgcttttgtggccacaggaaccaatctgtctctccagttctttccggccagctggcagggagaacagcgacaaacacctagccgagagtatgtcgacttagaaagagaagcaggcaaggtatatttgaaggctcccatgattctgaatggagtctgtgttatctggaaaggctggattgatctccaaagactggatggtatgggctgtctggagtttgatgaggagcgagcccagcaggaggatgcattagcacaacaggcctttgaagaggctcggagaaggacacgcgaatttgaagatagagacaggtctcatcgggaggaaatggagccattttctactcaggacacagatttagacttggagatgttagctccctatatcccaatggatgatgacttccagttacgttgaggactagtccctgttcccagagcccacttttttttctttttttgaaataaaatagcctgtctttcagatctaaaaaaaaaaaaaaaaaaaaaaaaaaaaaaaaaaaaaaaaaaaaaaaaaaaaaaaaaaaaaaaaaaaaaaaaaaaaaaaaaaaaaaaaaaaaaaaaaaaa

SEQ ID NO: 993 - RNA, 872 nt, synthetic construct
  misc_feature 1..872: note Artificial____CBFbeta(1-165)_Linker_HIF1alpha(549-575) mRNA wt mod
  source 1..872: mol_type = other RNA
aggagagtcccgcagtcggcgtccagcggctctgcttgttcgtgtgtgtgtcgttgcaggccttattcaagcttaccatgccgcgcgtcgtgcccgaccagagaagcaagtttgagaacgaggagttctttaggaagctgagccgcgagtgtgagattaagtacacgggctttagggaccggccccacgaggaacgccaggcacgcttccagaacgcctgccgcgacggccgctcggaaatcgcttttgtggccacaggaaccaatctgtctctccagttctttccggccagctggcagggagaacagcgacaaacacctagccgagagtatgtcgacttagaaagagaagcaggcaaggtatatttgaaggctcccatgattctgaatggagtctgtgttatctggaaaggctggattgatctccaaagactggatggtatgggctgtctggagtttgatgaggagcgagcccagcaggaggatgcattagcacaacaggcctttgaagaggctcggagaaggacacgcgaatttgaagatagagacaggtctcatcgggaggaaatggagggcgggagcggcgggtccggcgggagcggcggctccgggggcgggccattttctactcaggacacagatttagacttggagatgttagctccctatatcccaatggatgatgacttccagttacgttgaggactagtccctgttcccagagcccacttttttttctttttttgaaataaaatagcctgtctttcagatctaaaaaaaaaaaaaaaaaaaaaaaaaaaaaaaaaaaaaaaaaaaaaaaaaaaaaaaaaaaaaaaaaaaaaaaaaaaaaaaaaaaaaaaaaaaaaaaaaaaa

SEQ ID NO: 994 - RNA, 2507 nt, synthetic construct
  misc_feature 1..2507: note = Artificial____RUNX1(1-177)_N_RUNX1T1a(31-604) mRNA wt mod
  source 1..2507: mol_type = other RNA
aggagagtcccgcagtcggcgtccagcggctctgcttgttcgtgtgtgtgtcgttgcaggccttattcaagcttaccatgcgtatccccgtagatgccagcacgagccgccgcttcacgccgccttccaccgcgctgagcccaggcaagatgagcgaggcgttgccgctgggcgccccggacgccggcgctgccctggccggcaagctgaggagcggcgaccgcagcatggtggaggtgctggccgaccacccgggcgagctggtgcgcaccgacagccccaacttcctctgctccgtgctgcctacgcactggcgctgcaacaagaccctgcccatcgctttcaaggtggtggccctaggggatgttccagatggcactctggtcactgtgatggctggcaatgatgaaaactactcggctgagctgagaaatgctaccgcagccatgaagaaccaggttgcaagatttaatgacctcaggtttgtcggtcgaagtggaagagggaaaagtttcactctgaccatcactgtcttcacaaacccaccgcaagtcgccacctaccacagagccatcaaaatcacagtggatgggccccgagaacctcgaaaccgtactgagaagcactccacaatgccagactcacctgtggatgtgaagacgcaatctaggctgactcctccaacaatgccacctcccccaactactcaaggagctccaagaaccagttcatttacaccgacaacgttaactaatggcacgagccattctcctacagccttgaatggcgccccctcaccacccaatggcttcagcaatgggccttcctcttcttcctcctcctctctggctaatcaacagctgcccccagcctgtggtgccaggcaactcagcaagctgaaaaggttccttactaccctgcagcagtttggcaatgacatttcacccgagataggagaaagagttcgcaccctcgttctgggacttgtgaactccactttgacaattgaagaatttcattccaaactgcaagaagctactaacttcccactgagaccttttgtcatcccatttttgaaggccaacttgcccctgctgcagcgtgagctcctccactgcgcaagactggccaaacagaaccctgcccagtacctcgcccagcatgaacagctgcttctggatgccagcaccacctcacctgttgactcctcagagctgcttctcgatgtgaacgaaaacgggaagaggcgaactccagacagaaccaaagaaaatggctttgacagagagcctttgcactcagaacatccaagcaagcgaccatgcactattagcccaggccagcggtacagtccaaataacggcttatcctaccagcccaatggcctgcctcaccctaccccacctccacctcagcattaccgtttggatgatatggccattgcccaccactacagggactcctatcgacaccccagccacagggacctcagggacagaaacagacctatggggttgcatggcacacgtcaagaagaaatgattgatcacagactaacagacagagaatgggcagaagagtggaaacatcttgaccatctgttaaactgcataatggacatggtagaaaaaacaaggcgatctctcaccgtactaaggcggtgtcaagaagcagaccgggaagaattgaattactggatccggcggtacagtgacgccgaggacttaaaaaaaggtggcggcagtagcagcagccactctaggcagcagagtcccgtcaacccagacccagttgcactagacgcgcatcgggagttccttcacaggcctgcgtctggatacgtgccagaggagatctggaagaaagctgaggaggccgtcaatgaggtgaagcgccaggcgatgacggagctgcagaaggccgtgtctgaggcggagcggaaagcccacgacatgatcacaacagagagggccaagatggagcgcacggtcgccgaggccaaacggcaggcggcggaggacgcactggcagttatcaatcagcaggaggattcaagcgagagttgctggaattgtggccgtaaagcgagtgaaacctgcagtggctgtaacacagcccgatactgtggctcattttgccagcacaaagactgggagaagcaccatcacatctgtggacagaccctgcaggcccagcagcagggagacacacctgcagtcagctcctctgtcacgcccaacagcggggctgggagcccgatggacacaccaccagcagccactccgaggtcaaccaccccgggaaccccttccaccatagagacaacccctcgctgaggactagtccctgttcccagagcccacttttttttctttttttgaaataaaatagcctgtctttcagatctaaaaaaaaaaaaaaaaaaaaaaaaaaaaaaaaaaaaaaaaaaaaaaaaaaaaaaaaaaaaaaaaaaaaaaaaaaaaaaaaaaaaaaaaaaaaaaaaaaaa

SEQ ID NO: 995 - RNA, 1022 nt, synthetic construct
  misc_feature 1..1022: note = Artificial____RUNX1(1-241)_RUNX1T1b(short) mRNA wt mod
  source 1..1022: mol_type = other RNA
aggagagtcccgcagtcggcgtccagcggctctgcttgttcgtgtgtgtgtcgttgcaggccttattcaagcttaccatgcgtatccccgtagatgccagcacgagccgccgcttcacgccgccttccaccgcgctgagcccaggcaagatgagcgaggcgttgccgctgggcgccccggacgccggcgctgccctggccggcaagctgaggagcggcgaccgcagcatggtggaggtgctggccgaccacccgggcgagctggtgcgcaccgacagccccaacttcctctgctccgtgctgcctacgcactggcgctgcaacaagaccctgcccatcgctttcaaggtggtggccctaggggatgttccagatggcactctggtcactgtgatggctggcaatgatgaaaactactcggctgagctgagaaatgctaccgcagccatgaagaaccaggttgcaagatttaatgacctcaggtttgtcggtcgaagtggaagagggaaaagtttcactctgaccatcactgtcttcacaaacccaccgcaagtcgccacctaccacagagccatcaaaatcacagtggatgggccccgagaacctcgaagacatcggcagaaactagatgatcagaccaagcccgggagcttgtccttttccgagcggctcagtgaactggagcagctgcggcgcacagccatgagggtcagcccacaccacccagcccccacgcccaaccctcgtgcctccctgaaccactccactgcctttaaccctcagcctcagagtcagatgcaggaggtgggcttctgccacgtcgcccaggtggggctgaagctcctgggctgaggactagtccctgttcccagagcccacttttttttctttttttgaaataaaatagcctgtctttcagatctaaaaaaaaaaaaaaaaaaaaaaaaaaaaaaaaaaaaaaaaaaaaaaaaaaaaaaaaaaaaaaaaaaaaaaaaaaaaaaaaaaaaaaaaaaaaaaaaaaaa

SEQ ID NO: 996 - RNA, 2726 nt, synthetic construct
  misc_feature 1..2726: note = Artificial____RUNX1(1-241)_V_RUNX1T1b(22-604) mRNA wt mod
  source 1..2726: mol_type = other RNA
aggagagtcccgcagtcggcgtccagcggctctgcttgttcgtgtgtgtgtcgttgcaggccttattcaagcttaccatgcgtatccccgtagatgccagcacgagccgccgcttcacgccgccttccaccgcgctgagcccaggcaagatgagcgaggcgttgccgctgggcgccccggacgccggcgctgccctggccggcaagctgaggagcggcgaccgcagcatggtggaggtgctggccgaccacccgggcgagctggtgcgcaccgacagccccaacttcctctgctccgtgctgcctacgcactggcgctgcaacaagaccctgcccatcgctttcaaggtggtggccctaggggatgttccagatggcactctggtcactgtgatggctggcaatgatgaaaactactcggctgagctgagaaatgctaccgcagccatgaagaaccaggttgcaagatttaatgacctcaggtttgtcggtcgaagtggaagagggaaaagtttcactctgaccatcactgtcttcacaaacccaccgcaagtcgccacctaccacagagccatcaaaatcacagtggatgggccccgagaacctcgaagacatcggcagaaactagatgatcagaccaagcccgggagcttgtccttttccgagcggctcagtgaactggagcagctgcggcgcacagccatgagggtcagcccacaccacccagcccccacgcccaaccctcgtgcctccctgaaccactccactgcctttaaccctcagcctcagagtcagatgcaggtgggtcctgagaaaagggtgccagcgatgcctggatcgcctgtggaagtgaagatacagtccagatcctcacctcccaccatgccacccctcccaccaataaatcctggaggaccgaggccagtgtccttcactcctactgcattaagcaatggcatcaaccattctcctcctaccctgaatggtgccccatcaccgccacagagattcagcaatggtcctgcctcctccacatcatctgcactcacaaatcagcaattgccagccacttgtggtgctcgacaactcagcaagttgaaacgctttcttaccactctgcaacagtttggcaatgacatctcccctgagattggggagaaggtgcggactcttgttcttgcactggtgaactcaacagtgacaattgaggagttccactgtaagctccaagaagccacaaactttccccttcgtccttttgtgattccatttctcaaggccaacctgcccctgctgcagcgggaactgctgcactgcgctcgggcggccaagcagaccccatcccagtacctggctcagcacgaacaccttctgctcaacacaagcattgcatcgcctgctgactcgtcagagttgctcatggaggtgcacggaaatgggaagaggcccagtccagagaggagagaagagaatagttttgatagagacacaattgctcctgagcctcctgccaagagagtatgtaccatcagccctgctcctcggcacagtcctgctctcactgtgcccctcatgaatcccgggggccaattccatcctacccctccacctcttcagcattacaccttagaggatattgcaacttctcacctgtatcgggaacccaacaagatgctagagcatcgagaagttcgtgatagacaccacagtcttggtctaaatggaggctatcaagatgagttggtagatcatcgtttgacagaaagggaatgggctgatgaatggaaacatcttgaccatgcgctgaattgcattatggaaatggtagagaaaacaaggcgctctatggcagttctgcggcgctgtcaggaatcagatcgtgaagaactcaactactggaaaagacggtacaatgaaaacacagagctgaggaaaacggggaccgagttggtctccaggcagcacagccctgggagtgcagattctctcagcaatgattctcagagagagttcaacagcaggccaggtacaggatacgtacctgtggagttttggaagaaaacagaagaagctgtgaataaggtgaaaattcaggccatgtcagaagtacagaaggccgtcgctgaggcagagcagaaagcctttgaagtgattgcaacagagagagcacgaatggagcaaaccatagcggatgtcaagcggcaggccgcagaggatgctttcctcgtcatcaatgagcaagaggagtccacggagaactgctggaactgtggccgcaaagccagcgagacatgcagtggctgcaatatcgcgcgatactgtggctctttctgccagcacaaggactgggagcggcaccaccgcctctgtggtcagaacctgcatggccagagcccccacggccagggccggccgctgcttcctgtaggcaggggctcctctgccaggtccgccgactgcagcgtgcccagcccagccctcgacaagacctcggcaaccacatcgcgttcctcaacacctgcttctgtgacagctatcgacaccaacggactctgaggactagtccctgttcccagagcccacttttttttctttttttgaaataaaatagcctgtctttcagatctaaaaaaaaaaaaaaaaaaaaaaaaaaaaaaaaaaaaaaaaaaaaaaaaaaaaaaaaaaaaaaaaaaaaaaaaaaaaaaaaaaaaaaaaaaaaaaaaaaaa

SEQ ID NO: 997 - RNA, 2726 nt, synthetic construct
  misc_feature 1..2726: note = Artificial____RUNX1(1-241)_I_RUNX1T1b(22-604) mRNA wt mod
  source 1..2726: mol_type = other RNA
aggagagtcccgcagtcggcgtccagcggctctgcttgttcgtgtgtgtgtcgttgcaggccttattcaagcttaccatgcgtatccccgtagatgccagcacgagccgccgcttcacgccgccttccaccgcgctgagcccaggcaagatgagcgaggcgttgccgctgggcgccccggacgccggcgctgccctggccggcaagctgaggagcggcgaccgcagcatggtggaggtgctggccgaccacccgggcgagctggtgcgcaccgacagccccaacttcctctgctccgtgctgcctacgcactggcgctgcaacaagaccctgcccatcgctttcaaggtggtggccctaggggatgttccagatggcactctggtcactgtgatggctggcaatgatgaaaactactcggctgagctgagaaatgctaccgcagccatgaagaaccaggttgcaagatttaatgacctcaggtttgtcggtcgaagtggaagagggaaaagtttcactctgaccatcactgtcttcacaaacccaccgcaagtcgccacctaccacagagccatcaaaatcacagtggatgggccccgagaacctcgaagacatcggcagaaactagatgatcagaccaagcccgggagcttgtccttttccgagcggctcagtgaactggagcagctgcggcgcacagccatgagggtcagcccacaccacccagcccccacgcccaaccctcgtgcctccctgaaccactccactgcctttaaccctcagcctcagagtcagatgcagatcggtcctgagaaaagggtgccagcgatgcctggatcgcctgtggaagtgaagatacagtccagatcctcacctcccaccatgccacccctcccaccaataaatcctggaggaccgaggccagtgtccttcactcctactgcattaagcaatggcatcaaccattctcctcctaccctgaatggtgccccatcaccgccacagagattcagcaatggtcctgcctcctccacatcatctgcactcacaaatcagcaattgccagccacttgtggtgctcgacaactcagcaagttgaaacgctttcttaccactctgcaacagtttggcaatgacatctcccctgagattggggagaaggtgcggactcttgttcttgcactggtgaactcaacagtgacaattgaggagttccactgtaagctccaagaagccacaaactttccccttcgtccttttgtgattccatttctcaaggccaacctgcccctgctgcagcgggaactgctgcactgcgctcgggcggccaagcagaccccatcccagtacctggctcagcacgaacaccttctgctcaacacaagcattgcatcgcctgctgactcgtcagagttgctcatggaggtgcacggaaatgggaagaggcccagtccagagaggagagaagagaatagttttgatagagacacaattgctcctgagcctcctgccaagagagtatgtaccatcagccctgctcctcggcacagtcctgctctcactgtgcccctcatgaatcccgggggccaattccatcctacccctccacctcttcagcattacaccttagaggatattgcaacttctcacctgtatcgggaacccaacaagatgctagagcatcgagaagttcgtgatagacaccacagtcttggtctaaatggaggctatcaagatgagttggtagatcatcgtttgacagaaagggaatgggctgatgaatggaaacatcttgaccatgcgctgaattgcattatggaaatggtagagaaaacaaggcgctctatggcagttctgcggcgctgtcaggaatcagatcgtgaagaactcaactactggaaaagacggtacaatgaaaacacagagctgaggaaaacggggaccgagttggtctccaggcagcacagccctgggagtgcagattctctcagcaatgattctcagagagagttcaacagcaggccaggtacaggatacgtacctgtggagttttggaagaaaacagaagaagctgtgaataaggtgaaaattcaggccatgtcagaagtacagaaggccgtcgctgaggcagagcagaaagcctttgaagtgattgcaacagagagagcacgaatggagcaaaccatagcggatgtcaagcggcaggccgcagaggatgctttcctcgtcatcaatgagcaagaggagtccacggagaactgctggaactgtggccgcaaagccagcgagacatgcagtggctgcaatatcgcgcgatactgtggctctttctgccagcacaaggactgggagcggcaccaccgcctctgtggtcagaacctgcatggccagagcccccacggccagggccggccgctgcttcctgtaggcaggggctcctctgccaggtccgccgactgcagcgtgcccagcccagccctcgacaagacctcggcaaccacatcgcgttcctcaacacctgcttctgtgacagctatcgacaccaacggactctgaggactagtccctgttcccagagcccacttttttttctttttttgaaataaaatagcctgtctttcagatctaaaaaaaaaaaaaaaaaaaaaaaaaaaaaaaaaaaaaaaaaaaaaaaaaaaaaaaaaaaaaaaaaaaaaaaaaaaaaaaaaaaaaaaaaaaaaaaaaaaa

SEQ ID NO: 998 - RNA, 1610 nt, synthetic construct
  misc_feature 1..1610: note = Homo sapiens__Q01196-1__RUNX1(K83E_R174Q) mRNA opt1
  source 1..1610: mol_type = other RNA
aggagagtcccgcagtcggcgtccagcggctctgcttgttcgtgtgtgtgtcgttgcaggccttattcaagcttaccatgcgcatccccgtggacgccagcacctcccggcgcttcaccccgcccagcacggccctgtcccccggcaagatgagcgaggcgctccccctgggggccccggacgccggcgccgccctggcggggaagctccggtccggcgaccgcagcatggtcgaggtgctggccgaccaccccggggagctggtgcggaccgactcccccaacttcctctgcagcgtcctgcccacccactggcgctgcaacgagaccctgccgatcgccttcaaggtggtggccctcggcgacgtccccgacggcacgctggtgaccgtgatggcggggaacgacgagaactactccgccgagctgcggaacgccaccgccgccatgaagaaccaggtcgcgcgcttcaacgacctccggttcgtgggccgcagcgggcggggcaagtccttcaccctgacgatcaccgtgttcaccaacccgccccaggtcgccacctaccaccgcgccatcaagatcacggtggacgggccccaggagccccgccggcaccgccagaagctggacgaccagaccaagcccggcagcctctccttcagcgagcggctgtccgagctggagcagctccgccggaccgccatgcgcgtgagcccccaccacccggcccccacccccaacccccgggcgtccctgaaccacagcacggccttcaacccgcagccccagtcccagatgcaggacacccgccagatccagcccagcccgccctggagctacgaccagtcctaccagtacctgggcagcatcgcctcccccagcgtccaccccgccacccccatctccccggggcgcgccagcggcatgaccacgctctccgcggagctgagctcccggctgagcaccgcccccgacctcaccgccttctccgacccccgccagttcccggccctgcccagcatctccgacccccggatgcactaccccggggccttcacctacagcccgacgcccgtgacctccggcatcggcatcgggatgagcgcgatgggctccgccacccgctaccacacctacctgcccccgccctaccccgggagctcccaggcccagggcgggcccttccaggccagcagcccctcctaccacctctactacggcgcgagcgccggctcctaccagttcagcatggtcgggggcgagcggtccccgccccgcatcctgccgccctgcacgaacgccagcaccgggtccgccctgctcaaccccagcctgcccaaccagtccgacgtggtggaggccgagggcagccactccaacagccccaccaacatggcgccctccgcccggctggaggaggccgtgtggcgcccgtactgaggactagtccctgttcccagagcccacttttttttctttttttgaaataaaatagcctgtctttcagatctaaaaaaaaaaaaaaaaaaaaaaaaaaaaaaaaaaaaaaaaaaaaaaaaaaaaaaaaaaaaaaaaaaaaaaaaaaaaaaaaaaaaaaaaaaaaaaaaaaaa

SEQ ID NO: 999 - RNA, 2084 nt, synthetic construct
  misc_feature 1..2084: note = Homo sapiens____CBFbeta(1-165)_SMMHC(1527-1972) mRNA opt1
  source 1..2084: mol_type = other RNA
aggagagtcccgcagtcggcgtccagcggctctgcttgttcgtgtgtgtgtcgttgcaggccttattcaagcttaccatgccccgcgtggtcccggaccagcggagcaagttcgagaacgaggagttcttccgcaagctgtcccgggagtgcgagatcaagtacaccggcttccgcgaccggccccacgaggagcgccaggcccggttccagaacgcctgccgcgacgggcggagcgagatcgcgttcgtggccaccggcacgaacctctccctgcagttcttccccgccagctggcagggggagcagcgccagaccccctcccgggagtacgtggacctggagcgcgaggccggcaaggtctacctcaaggccccgatgatcctgaacggggtgtgcgtgatctggaagggctggatcgacctgcagcggctcgacggcatggggtgcctggagttcgacgaggagcgcgcgcagcaggaggacgccctggcccagcaggccttcgaggaggcgcggcgccggacccgcgagttcgaggaccgggaccgcagccaccgggaggagatggaggtgcacgagctggagaagtccaagcgcgccctcgagacccagatggaggagatgaagacccagctggaggagctggaggacgagctccaggccacggaggacgcgaagctgcggctggaggtcaacatgcaggccctcaagggccagttcgagcgcgacctgcaggcccgggacgagcagaacgaggagaagcgccggcagctgcagcgccagctccacgagtacgagaccgagctggaggacgagcggaagcagcgcgccctggccgcggccgccaagaagaagctcgagggggacctgaaggacctggagctccaggccgacagcgcgatcaagggccgggaggaggccatcaagcagctgcgcaagctgcaggcccagatgaaggacttccagcgggagctcgaggacgcccgcgccagccgggacgagatcttcgcgaccgccaaggagaacgagaagaaggccaagtccctggaggccgacctgatgcagctccaggaggacctggccgcggccgagcgcgcccggaagcaggccgacctggagaaggaggagctcgccgaggagctggcgagctccctgagcgggcgcaacgccctccaggacgagaagcggcgcctggaggcccggatcgcccagctggaggaggagctcgaggaggagcagggcaacatggaggccatgtccgaccgcgtgcggaaggcgacccagcaggccgagcagctgagcaacgagctggccacggagcgctccaccgcccagaagaacgagagcgcgcgccagcagctcgagcggcagaacaaggagctgcgctccaagctgcacgagatggagggggccgtgaagtccaagttcaagagcaccatcgccgccctcgaggccaagatcgcgcagctggaggagcaggtcgagcaggaggcccgggagaagcaggccgccaccaagagcctgaagcagaaggacaagaagctcaaggagatcctgctccaggtggaggacgagcgcaagatggccgagcagtacaaggagcaggcggagaagggcaacgcccgggtgaagcagctgaagcgccagctggaggaggccgaggaggagtcccagcggatcaacgccaaccgccggaagctgcagcgcgagctcgacgaggccacggagagcaacgaggcgatgggccgggaggtcaacgccctgaagtccaagctgcgccgggggaacgagaccagcttcgtgccctcccgccggagcggcgggcgccgggtgatcgagaacgccgacggcagcgaggaggagaccgacacccgcgacgccgacttcaacgggacgaaggcgtccgagtgaggactagtccctgttcccagagcccacttttttttctttttttgaaataaaatagcctgtctttcagatctaaaaaaaaaaaaaaaaaaaaaaaaaaaaaaaaaaaaaaaaaaaaaaaaaaaaaaaaaaaaaaaaaaaaaaaaaaaaaaaaaaaaaaaaaaaaaaaaaaaa

SEQ ID NO: 1000 - RNA, 1799 nt, synthetic construct
  misc_feature 1..1799: note = Artificial____CBFbeta(1-165)_SMMHC(1527-1877) mRNA opt1
  source 1..1799: mol_type = other RNA
aggagagtcccgcagtcggcgtccagcggctctgcttgttcgtgtgtgtgtcgttgcaggccttattcaagcttaccatgccccgcgtggtcccggaccagcggagcaagttcgagaacgaggagttcttccgcaagctgtcccgggagtgcgagatcaagtacaccggcttccgcgaccggccccacgaggagcgccaggcccggttccagaacgcctgccgcgacgggcggagcgagatcgcgttcgtggccaccggcacgaacctctccctgcagttcttccccgccagctggcagggggagcagcgccagaccccctcccgggagtacgtggacctggagcgcgaggccggcaaggtctacctcaaggccccgatgatcctgaacggggtgtgcgtgatctggaagggctggatcgacctgcagcggctcgacggcatggggtgcctggagttcgacgaggagcgcgcgcagcaggaggacgccctggcccagcaggccttcgaggaggcgcggcgccggacccgcgagttcgaggaccgggaccgcagccaccgggaggagatggaggtgcacgagctggagaagtccaagcgcgccctcgagacccagatggaggagatgaagacccagctggaggagctggaggacgagctccaggccacggaggacgcgaagctgcggctggaggtcaacatgcaggccctcaagggccagttcgagcgcgacctgcaggcccgggacgagcagaacgaggagaagcgccggcagctgcagcgccagctccacgagtacgagaccgagctggaggacgagcggaagcagcgcgccctggccgcggccgccaagaagaagctcgagggggacctgaaggacctggagctccaggccgacagcgcgatcaagggccgggaggaggccatcaagcagctgcgcaagctgcaggcccagatgaaggacttccagcgggagctcgaggacgcccgcgccagccgggacgagatcttcgcgaccgccaaggagaacgagaagaaggccaagtccctggaggccgacctgatgcagctccaggaggacctggccgcggccgagcgcgcccggaagcaggccgacctggagaaggaggagctcgccgaggagctggcgagctccctgagcgggcgcaacgccctccaggacgagaagcggcgcctggaggcccggatcgcccagctggaggaggagctcgaggaggagcagggcaacatggaggccatgtccgaccgcgtgcggaaggcgacccagcaggccgagcagctgagcaacgagctggccacggagcgctccaccgcccagaagaacgagagcgcgcgccagcagctcgagcggcagaacaaggagctgcgctccaagctgcacgagatggagggggccgtgaagtccaagttcaagagcaccatcgccgccctcgaggccaagatcgcgcagctggaggagcaggtcgagcaggaggcccgggagaagcaggccgccaccaagagcctgaagcagaaggacaagaagctcaaggagatcctgctccaggtggaggacgagcgcaagatggccgagcagtacaaggagcaggcggagaagggcaacgcctgaggactagtccctgttcccagagcccacttttttttctttttttgaaataaaatagcctgtctttcagatctaaaaaaaaaaaaaaaaaaaaaaaaaaaaaaaaaaaaaaaaaaaaaaaaaaaaaaaaaaaaaaaaaaaaaaaaaaaaaaaaaaaaaaaaaaaaaaaaaaaa

SEQ ID NO: 1001 - RNA, 860 nt, synthetic construct
  misc_feature 1..860: note = Artificial____CBFbeta(1-165)_Linker_Lifeact mRNA opt1
  source 1..860: mol_type = other RNA
aggagagtcccgcagtcggcgtccagcggctctgcttgttcgtgtgtgtgtcgttgcaggccttattcaagcttaccatgccccgcgtggtcccggaccagcggagcaagttcgagaacgaggagttcttccgcaagctgtcccgggagtgcgagatcaagtacaccggcttccgcgaccggccccacgaggagcgccaggcccggttccagaacgcctgccgcgacgggcggagcgagatcgcgttcgtggccaccggcacgaacctctccctgcagttcttccccgccagctggcagggggagcagcgccagaccccctcccgggagtacgtggacctggagcgcgaggccggcaaggtctacctcaaggccccgatgatcctgaacggggtgtgcgtgatctggaagggctggatcgacctgcagcggctcgacggcatggggtgcctggagttcgacgaggagcgcgcgcagcaggaggacgccctggcccagcaggccttcgaggaggcgcggcgccggacccgcgagttcgaggaccgggaccgcagccaccgggaggagatggagggcgggagcggcgggtccggcgggagcggcggctccgggggcgggggcgtggccgacctgatcaagaagttcgagagcatctccaaggaggagggggacccgcccgtcgccacctgaggactagtccctgttcccagagcccacttttttttctttttttgaaataaaatagcctgtctttcagatctaaaaaaaaaaaaaaaaaaaaaaaaaaaaaaaaaaaaaaaaaaaaaaaaaaaaaaaaaaaaaaaaaaaaaaaaaaaaaaaaaaaaaaaaaaaaaaaaaaaa

SEQ ID NO: 1002 - RNA, 827 nt, synthetic construct
  misc_feature 1..827: note = Artificial____CBFbeta(1-165)_HIF1alpha(549-575) mRNA opt1
  source 1..827: mol_type = other RNA
aggagagtcccgcagtcggcgtccagcggctctgcttgttcgtgtgtgtgtcgttgcaggccttattcaagcttaccatgccccgcgtggtcccggaccagcggagcaagttcgagaacgaggagttcttccgcaagctgtcccgggagtgcgagatcaagtacaccggcttccgcgaccggccccacgaggagcgccaggcccggttccagaacgcctgccgcgacgggcggagcgagatcgcgttcgtggccaccggcacgaacctctccctgcagttcttccccgccagctggcagggggagcagcgccagaccccctcccgggagtacgtggacctggagcgcgaggccggcaaggtctacctcaaggccccgatgatcctgaacggggtgtgcgtgatctggaagggctggatcgacctgcagcggctcgacggcatggggtgcctggagttcgacgaggagcgcgcgcagcaggaggacgccctggcccagcaggccttcgaggaggcgcggcgccggacccgcgagttcgaggaccgggaccgcagccaccgggaggagatggagcccttcagcacccaggacaccgacctggacctcgagatgctggccccgtacatccccatggacgacgacttccagctgcgctgaggactagtccctgttcccagagcccacttttttttctttttttgaaataaaatagcctgtctttcagatctaaaaaaaaaaaaaaaaaaaaaaaaaaaaaaaaaaaaaaaaaaaaaaaaaaaaaaaaaaaaaaaaaaaaaaaaaaaaaaaaaaaaaaaaaaaaaaaaaaaa

SEQ ID NO: 1003 - RNA, 872 nt, synthetic construct
  misc_feature 1..872: note Artificial____CBFbeta(1-165)_Linker_HIF1alpha(549-575) mRNA opt1
  source 1..872: mol_type = other RNA
aggagagtcccgcagtcggcgtccagcggctctgcttgttcgtgtgtgtgtcgttgcaggccttattcaagcttaccatgccccgcgtggtcccggaccagcggagcaagttcgagaacgaggagttcttccgcaagctgtcccgggagtgcgagatcaagtacaccggcttccgcgaccggccccacgaggagcgccaggcccggttccagaacgcctgccgcgacgggcggagcgagatcgcgttcgtggccaccggcacgaacctctccctgcagttcttccccgccagctggcagggggagcagcgccagaccccctcccgggagtacgtggacctggagcgcgaggccggcaaggtctacctcaaggccccgatgatcctgaacggggtgtgcgtgatctggaagggctggatcgacctgcagcggctcgacggcatggggtgcctggagttcgacgaggagcgcgcgcagcaggaggacgccctggcccagcaggccttcgaggaggcgcggcgccggacccgcgagttcgaggaccgggaccgcagccaccgggaggagatggagggcgggagcggcgggtccggcgggagcggcggctccgggggcgggcccttcagcacccaggacaccgacctggacctcgagatgctggccccgtacatccccatggacgacgacttccagctgcgctgaggactagtccctgttcccagagcccacttttttttctttttttgaaataaaatagcctgtctttcagatctaaaaaaaaaaaaaaaaaaaaaaaaaaaaaaaaaaaaaaaaaaaaaaaaaaaaaaaaaaaaaaaaaaaaaaaaaaaaaaaaaaaaaaaaaaaaaaaaaaaa

SEQ ID NO: 1004 - RNA, 2507 nt, synthetic construct
  misc_feature 1..2507: note = Artificial____RUNX1(1-177)_N_RUNX1T1a(31-604) mRNA opt1
  source 1..2507: mol_type = other RNA
aggagagtcccgcagtcggcgtccagcggctctgcttgttcgtgtgtgtgtcgttgcaggccttattcaagcttaccatgcgcatccccgtggacgccagcacctcccggcgcttcaccccgcccagcacggccctgtcccccggcaagatgagcgaggcgctccccctgggggccccggacgccggcgccgccctggcggggaagctccggtccggcgaccgcagcatggtcgaggtgctggccgaccaccccggggagctggtgcggaccgactcccccaacttcctctgcagcgtcctgcccacccactggcgctgcaacaagaccctgccgatcgccttcaaggtggtggccctcggcgacgtccccgacggcacgctggtgaccgtgatggcggggaacgacgagaactactccgccgagctgcggaacgccaccgccgccatgaagaaccaggtcgcgcgcttcaacgacctccggttcgtgggccgcagcgggcggggcaagtccttcaccctgacgatcaccgtgttcaccaacccgccccaggtcgccacctaccaccgcgccatcaagatcacggtggacgggccccgggagccccgcaaccggaccgagaagcacagcacgatgcccgactccccggtggacgtgaagacccagagccgcctgaccccgcccaccatgcccccgccgcccacgacccagggcgcgccccggacctccagcttcacccccacgaccctgaccaacgggacctcccacagccccacggccctcaacggcgccccctccccgcccaacgggttcagcaacggcccctccagctccagctccagctccctggccaaccagcagctgccgcccgcctgcggcgcccgccagctcagcaagctgaagcggttcctgaccaccctccagcagttcgggaacgacatctcccccgagatcggcgagcgcgtccggaccctggtgctggggctcgtgaacagcacgctgaccatcgaggagttccacagcaagctgcaggaggcgaccaacttccccctccgccccttcgtcatccccttcctgaaggccaacctgcccctcctgcagcgggagctgctccactgcgcccgcctggccaagcagaaccccgcgcagtacctggcccagcacgagcagctcctgctggacgcctccaccacgagccccgtggactccagcgagctcctgctggacgtgaacgagaacggcaagcggcgcacccccgaccggaccaaggagaacgggttcgaccgcgagccgctccactccgagcaccccagcaagcggccctgcaccatctcccccggccagcgctacagcccgaacaacggcctgtcctaccagcccaacgggctgccccacccgacgcccccgccgccccagcactaccggctcgacgacatggccatcgcccaccactaccgcgacagctaccggcacccctcccaccgcgacctgcgcgaccggaaccgccccatgggcctgcacgggacccggcaggaggagatgatcgaccaccgcctcaccgaccgggagtgggcggaggagtggaagcacctggaccacctcctgaactgcatcatggacatggtcgagaagacccgccggagcctgacggtgctgcgccggtgccaggaggccgaccgcgaggagctcaactactggatccggcgctactccgacgccgaggacctgaagaagggcggcgggagctccagctcccacagccggcagcagtcccccgtgaaccccgaccccgtcgccctggacgcccaccgcgagttcctccaccggcccgcgagcggctacgtgcccgaggagatctggaagaaggccgaggaggccgtgaacgaggtcaagcgccaggccatgaccgagctgcagaaggccgtgagcgaggcggagcggaaggcccacgacatgatcaccaccgagcgcgccaagatggagcggacggtggccgaggccaagcgccaggcggccgaggacgccctggccgtcatcaaccagcaggaggactccagcgagtcctgctggaactgcgggcgcaaggcgagcgagacctgctccggctgcaacaccgcccggtactgcgggagcttctgccagcacaaggactgggagaagcaccaccacatctgcggccagaccctgcaggcccagcagcagggcgacacgccggccgtgtccagctccgtgacccccaacagcggggccggctcccccatggacacgcccccggcggccacgccccgcagcaccacccccgggaccccctccaccatcgagaccaccccgcggtgaggactagtccctgttcccagagcccacttttttttctttttttgaaataaaatagcctgtctttcagatctaaaaaaaaaaaaaaaaaaaaaaaaaaaaaaaaaaaaaaaaaaaaaaaaaaaaaaaaaaaaaaaaaaaaaaaaaaaaaaaaaaaaaaaaaaaaaaaaaaaa

SEQ ID NO: 1005 - RNA, 1022 nt, synthetic construct
  misc_feature 1..1022: note = Artificial____RUNX1(1-241)_RUNX1T1b(short) mRNA opt1
  source 1..1022: mol_type = other RNA
aggagagtcccgcagtcggcgtccagcggctctgcttgttcgtgtgtgtgtcgttgcaggccttattcaagcttaccatgcgcatccccgtggacgccagcacctcccggcgcttcaccccgcccagcacggccctgtcccccggcaagatgagcgaggcgctccccctgggggccccggacgccggcgccgccctggcggggaagctccggtccggcgaccgcagcatggtcgaggtgctggccgaccaccccggggagctggtgcggaccgactcccccaacttcctctgcagcgtcctgcccacccactggcgctgcaacaagaccctgccgatcgccttcaaggtggtggccctcggcgacgtccccgacggcacgctggtgaccgtgatggcggggaacgacgagaactactccgccgagctgcggaacgccaccgccgccatgaagaaccaggtcgcgcgcttcaacgacctccggttcgtgggccgcagcgggcggggcaagtccttcaccctgacgatcaccgtgttcaccaacccgccccaggtcgccacctaccaccgcgccatcaagatcacggtggacgggccccgggagccccgccggcaccgccagaagctggacgaccagaccaagcccggcagcctctccttcagcgagcggctgtccgagctggagcagctccgccggaccgccatgcgcgtgagcccccaccacccggcccccacccccaacccccgggcgtccctgaaccacagcacggccttcaacccgcagccccagtcccagatgcaggaggtgggcttctgccacgtcgcccaggtggggctgaagctcctgggctgaggactagtccctgttcccagagcccacttttttttctttttttgaaataaaatagcctgtctttcagatctaaaaaaaaaaaaaaaaaaaaaaaaaaaaaaaaaaaaaaaaaaaaaaaaaaaaaaaaaaaaaaaaaaaaaaaaaaaaaaaaaaaaaaaaaaaaaaaaaaaa

SEQ ID NO: 1006 - RNA, 2726 nt, synthetic construct
  misc_feature 1..2726: note = Artificial____RUNX1(1-241)_V_RUNX1T1b(22-604) mRNA opt1
  source 1..2726: mol_type = other RNA
aggagagtcccgcagtcggcgtccagcggctctgcttgttcgtgtgtgtgtcgttgcaggccttattcaagcttaccatgcgcatccccgtggacgccagcacctcccggcgcttcaccccgcccagcacggccctgtcccccggcaagatgagcgaggcgctccccctgggggccccggacgccggcgccgccctggcggggaagctccggtccggcgaccgcagcatggtcgaggtgctggccgaccaccccggggagctggtgcggaccgactcccccaacttcctctgcagcgtcctgcccacccactggcgctgcaacaagaccctgccgatcgccttcaaggtggtggccctcggcgacgtccccgacggcacgctggtgaccgtgatggcggggaacgacgagaactactccgccgagctgcggaacgccaccgccgccatgaagaaccaggtcgcgcgcttcaacgacctccggttcgtgggccgcagcgggcggggcaagtccttcaccctgacgatcaccgtgttcaccaacccgccccaggtcgccacctaccaccgcgccatcaagatcacggtggacgggccccgggagccccgccggcaccgccagaagctggacgaccagaccaagcccggcagcctctccttcagcgagcggctgtccgagctggagcagctccgccggaccgccatgcgcgtgagcccccaccacccggcccccacccccaacccccgggcgtccctgaaccacagcacggccttcaacccgcagccccagtcccagatgcaggtggggcccgagaagcgggtgccggcgatgcccggcagccccgtggaggtcaagatccagtcccgcagctccccgcccaccatgccgcccctgccgcccatcaaccccgggggcccccggcccgtgagcttcacccccacggccctgtccaacgggatcaaccactccccgcccaccctcaacggcgcccccagcccgccccagcgcttcagcaacggccccgcctccagcacctccagcgccctgaccaaccagcagctgcccgcgacgtgcggggcccggcagctctccaagctgaagcgcttcctgaccaccctccagcagttcggcaacgacatcagccccgagatcggggagaaggtgcggaccctggtcctggccctcgtgaactccacggtgaccatcgaggagttccactgcaagctgcaggaggccaccaacttccccctgcgccccttcgtcatccccttcctcaaggcgaacctgccgctgctccagcgggagctgctgcactgcgcccgcgccgccaagcagacccccagccagtacctcgcccagcacgagcacctcctgctgaacacgtccatcgcgagccccgccgacagctccgagctgctgatggaggtgcacggcaacgggaagcggcccagcccggagcgccgggaggagaactccttcgaccgcgacaccatcgcccccgagcccccggccaagcgggtgtgcaccatcagccccgcgccccgccactcccccgccctcaccgtcccgctgatgaaccccggcggccagttccaccccacgcccccgcccctgcagcactacaccctcgaggacatcgccaccagccacctgtaccgggagcccaacaagatgctggagcaccgcgaggtgcgggaccgccaccactccctcgggctgaacggcgggtaccaggacgagctggtggaccaccggctcaccgagcgcgagtgggccgacgagtggaagcacctggaccacgccctgaactgcatcatggagatggtcgagaagacgcgccggagcatggccgtgctccgccggtgccaggagtccgaccgcgaggagctgaactactggaagcggcgctacaacgagaacaccgagctgcggaagaccggcaccgagctcgtgagccgccagcactcccccggcagcgcggactccctgagcaacgactcccagcgggagttcaacagccgcccggggacgggctacgtccccgtggagttctggaagaagaccgaggaggccgtgaacaaggtcaagatccaggccatgtccgaggtgcagaaggccgtggccgaggcggagcagaaggccttcgaggtcatcgccaccgagcgggcccgcatggagcagaccatcgcggacgtgaagcggcaggccgccgaggacgccttcctggtcatcaacgagcaggaggagagcacggagaactgctggaactgcgggcgcaaggcctccgagacctgcagcggctgcaacatcgcgcggtactgcgggagcttctgccagcacaaggactgggagcgccaccaccggctctgcggccagaacctgcacggccagtccccgcacgggcagggccgccccctgctgcccgtggggcggggcagctccgcccgcagcgccgactgctccgtgcccagccccgccctcgacaagacctccgccaccacgagccgctccagcacccccgcgtccgtcaccgccatcgacaccaacgggctgtgaggactagtccctgttcccagagcccacttttttttctttttttgaaataaaatagcctgtctttcagatctaaaaaaaaaaaaaaaaaaaaaaaaaaaaaaaaaaaaaaaaaaaaaaaaaaaaaaaaaaaaaaaaaaaaaaaaaaaaaaaaaaaaaaaaaaaaaaaaaaaa

SEQ ID NO: 1007 - RNA, 2726 nt, synthetic construct
  misc_feature 1..2726: note = Artificial____RUNX1(1-241)_I_RUNX1T1b(22-604) mRNA opt1
  source 1..2726: mol_type = other RNA
aggagagtcccgcagtcggcgtccagcggctctgcttgttcgtgtgtgtgtcgttgcaggccttattcaagcttaccatgcgcatccccgtggacgccagcacctcccggcgcttcaccccgcccagcacggccctgtcccccggcaagatgagcgaggcgctccccctgggggccccggacgccggcgccgccctggcggggaagctccggtccggcgaccgcagcatggtcgaggtgctggccgaccaccccggggagctggtgcggaccgactcccccaacttcctctgcagcgtcctgcccacccactggcgctgcaacaagaccctgccgatcgccttcaaggtggtggccctcggcgacgtccccgacggcacgctggtgaccgtgatggcggggaacgacgagaactactccgccgagctgcggaacgccaccgccgccatgaagaaccaggtcgcgcgcttcaacgacctccggttcgtgggccgcagcgggcggggcaagtccttcaccctgacgatcaccgtgttcaccaacccgccccaggtcgccacctaccaccgcgccatcaagatcacggtggacgggccccgggagccccgccggcaccgccagaagctggacgaccagaccaagcccggcagcctctccttcagcgagcggctgtccgagctggagcagctccgccggaccgccatgcgcgtgagcccccaccacccggcccccacccccaacccccgggcgtccctgaaccacagcacggccttcaacccgcagccccagtcccagatgcagatcgggcccgagaagcgggtgccggcgatgcccggcagccccgtggaggtcaagatccagtcccgcagctccccgcccaccatgccgcccctgccgcccatcaaccccgggggcccccggcccgtgagcttcacccccacggccctgtccaacgggatcaaccactccccgcccaccctcaacggcgcccccagcccgccccagcgcttcagcaacggccccgcctccagcacctccagcgccctgaccaaccagcagctgcccgcgacgtgcggggcccggcagctctccaagctgaagcgcttcctgaccaccctccagcagttcggcaacgacatcagccccgagatcggggagaaggtgcggaccctggtcctggccctcgtgaactccacggtgaccatcgaggagttccactgcaagctgcaggaggccaccaacttccccctgcgccccttcgtcatccccttcctcaaggcgaacctgccgctgctccagcgggagctgctgcactgcgcccgcgccgccaagcagacccccagccagtacctcgcccagcacgagcacctcctgctgaacacgtccatcgcgagccccgccgacagctccgagctgctgatggaggtgcacggcaacgggaagcggcccagcccggagcgccgggaggagaactccttcgaccgcgacaccatcgcccccgagcccccggccaagcgggtgtgcaccatcagccccgcgccccgccactcccccgccctcaccgtcccgctgatgaaccccggcggccagttccaccccacgcccccgcccctgcagcactacaccctcgaggacatcgccaccagccacctgtaccgggagcccaacaagatgctggagcaccgcgaggtgcgggaccgccaccactccctcgggctgaacggcgggtaccaggacgagctggtggaccaccggctcaccgagcgcgagtgggccgacgagtggaagcacctggaccacgccctgaactgcatcatggagatggtcgagaagacgcgccggagcatggccgtgctccgccggtgccaggagtccgaccgcgaggagctgaactactggaagcggcgctacaacgagaacaccgagctgcggaagaccggcaccgagctcgtgagccgccagcactcccccggcagcgcggactccctgagcaacgactcccagcgggagttcaacagccgcccggggacgggctacgtccccgtggagttctggaagaagaccgaggaggccgtgaacaaggtcaagatccaggccatgtccgaggtgcagaaggccgtggccgaggcggagcagaaggccttcgaggtcatcgccaccgagcgggcccgcatggagcagaccatcgcggacgtgaagcggcaggccgccgaggacgccttcctggtcatcaacgagcaggaggagagcacggagaactgctggaactgcgggcgcaaggcctccgagacctgcagcggctgcaacatcgcgcggtactgcgggagcttctgccagcacaaggactgggagcgccaccaccggctctgcggccagaacctgcacggccagtccccgcacgggcagggccgccccctgctgcccgtggggcggggcagctccgcccgcagcgccgactgctccgtgcccagccccgccctcgacaagacctccgccaccacgagccgctccagcacccccgcgtccgtcaccgccatcgacaccaacgggctgtgaggactagtccctgttcccagagcccacttttttttctttttttgaaataaaatagcctgtctttcagatctaaaaaaaaaaaaaaaaaaaaaaaaaaaaaaaaaaaaaaaaaaaaaaaaaaaaaaaaaaaaaaaaaaaaaaaaaaaaaaaaaaaaaaaaaaaaaaaaaaaa

SEQ ID NO: 1008 - RNA, 1610 nt, synthetic construct
  misc_feature 1..1610: note = Homo sapiens__Q01196-1__RUNX1(K83E_R174Q) mRNA opt1
  source 1..1610: mol_type = other RNA
aggagagtcccgcagtcggcgtccagcggctctgcttgttcgtgtgtgtgtcgttgcaggccttattcaagcttaccatgcgcatccccgtggacgccagcacctcccggcgcttcaccccgcccagcacggccctgtcccccggcaagatgagcgaggcgctccccctgggggccccggacgccggcgccgccctggcggggaagctccggtccggcgaccgcagcatggtcgaggtgctggccgaccaccccggggagctggtgcggaccgactcccccaacttcctctgcagcgtcctgcccacccactggcgctgcaacgagaccctgccgatcgccttcaaggtggtggccctcggcgacgtccccgacggcacgctggtgaccgtgatggcggggaacgacgagaactactccgccgagctgcggaacgccaccgccgccatgaagaaccaggtcgcgcgcttcaacgacctccggttcgtgggccgcagcgggcggggcaagtccttcaccctgacgatcaccgtgttcaccaacccgccccaggtcgccacctaccaccgcgccatcaagatcacggtggacgggccccaggagccccggcgccaccggcagaagctggacgaccagaccaagcccggcagcctctccttcagcgagcgcctgtccgagctggagcagctccggcgcaccgccatgcgggtgagcccccaccacccggcccccacccccaacccccgcgcgtccctgaaccacagcacggccttcaacccgcagccccagtcccagatgcaggacacccggcagatccagcccagcccgccctggagctacgaccagtcctaccagtacctgggcagcatcgcctcccccagcgtccaccccgccacccccatctccccggggcgcgccagcggcatgaccacgctctccgcggagctgagctcccgcctgagcaccgcccccgacctcaccgccttctccgacccccggcagttcccggccctgcccagcatctccgacccccgcatgcactaccccggggccttcacctacagcccgacgcccgtgacctccggcatcggcatcgggatgagcgcgatgggctccgccacccggtaccacacctacctgcccccgccctaccccgggagctcccaggcccagggcgggcccttccaggccagcagcccctcctaccacctctactacggcgcgagcgccggctcctaccagttcagcatggtcgggggcgagcgctccccgccccggatcctgccgccctgcacgaacgccagcaccgggtccgccctgctcaaccccagcctgcccaaccagtccgacgtggtggaggccgagggcagccactccaacagccccaccaacatggcgccctccgcccgcctggaggaggccgtgtggcggccgtactgaggactagtccctgttcccagagcccacttttttttctttttttgaaataaaatagcctgtctttcagatctaaaaaaaaaaaaaaaaaaaaaaaaaaaaaaaaaaaaaaaaaaaaaaaaaaaaaaaaaaaaaaaaaaaaaaaaaaaaaaaaaaaaaaaaaaaaaaaaaaaa

SEQ ID NO: 1009 - RNA, 2084 nt, synthetic construct
  misc_feature 1..2084: note = Homo sapiens____CBFbeta(1-165)_SMMHC(1527-1972) mRNA opt1
  source 1..2084: mol_type = other RNA
aggagagtcccgcagtcggcgtccagcggctctgcttgttcgtgtgtgtgtcgttgcaggccttattcaagcttaccatgccccgcgtggtcccggaccagcggagcaagttcgagaacgaggagttcttccgcaagctgtcccgggagtgcgagatcaagtacaccggcttccgcgaccggccccacgaggagcgccaggcccggttccagaacgcctgccgcgacgggcggagcgagatcgcgttcgtggccaccggcacgaacctctccctgcagttcttccccgccagctggcagggggagcagcgccagaccccctcccgggagtacgtggacctggagcgcgaggccggcaaggtctacctcaaggccccgatgatcctgaacggggtgtgcgtgatctggaagggctggatcgacctgcagcggctcgacggcatggggtgcctggagttcgacgaggagcgcgcgcagcaggaggacgccctggcccagcaggccttcgaggaggcgcggcgccggacccgcgagttcgaggaccgggaccgcagccaccgggaggagatggaggtccacgagctcgagaagtccaagcgcgccctggagacccagatggaggagatgaagacgcagctggaggagctcgaggacgagctgcaggccaccgaggacgccaagctgcgcctcgaggtgaacatgcaggccctgaagggccagttcgagcgggacctgcaggcgcgcgacgagcagaacgaggagaagcggcgccagctccagcggcagctgcacgagtacgagaccgagctggaggacgagcgcaagcagcgggccctcgccgccgccgcgaagaagaagctggagggggacctgaaggacctcgagctgcaggccgacagcgccatcaagggccgcgaggaggccatcaagcagctgcggaagctccaggcccagatgaaggacttccagcgcgagctggaggacgcgcgggcctcccgcgacgagatcttcgccaccgccaaggagaacgagaagaaggccaagagcctggaggcggacctcatgcagctgcaggaggacctggccgccgccgagcgggcgcgcaagcaggccgacctcgagaaggaggagctggccgaggagctggcctccagcctctccgggcggaacgccctgcaggacgagaagcgccggctggaggcgcgcatcgcccagctcgaggaggagctggaggaggagcagggcaacatggaggccatgagcgaccgggtgcgcaaggccacgcagcaggccgagcagctgtccaacgagctcgcgaccgagcgcagcaccgcccagaagaacgagtccgcccggcagcagctggagcgccagaacaaggagctgcggagcaagctccacgagatggagggcgccgtcaagtccaagttcaagagcaccatcgccgcgctggaggccaagatcgcccagctggaggagcaggtcgagcaggaggcccgcgagaagcaggcggccaccaagagcctgaagcagaaggacaagaagctcaaggagatcctgctccaggtggaggacgagcggaagatggccgagcagtacaaggagcaggccgagaaggggaacgcccgcgtgaagcagctgaagcggcagctggaggaggcggaggaggagtcccagcgcatcaacgccaaccggcgcaagctgcagcgggagctcgacgaggccacggagagcaacgaggccatgggccgcgaggtgaacgccctgaagtccaagctgcggcgcgggaacgagaccagcttcgtgccctcccggcgcagcggcggccggcgcgtcatcgagaacgcggacgggtccgaggaggagaccgacacgcgggacgccgacttcaacggcaccaaggccagcgagtgaggactagtccctgttcccagagcccacttttttttctttttttgaaataaaatagcctgtctttcagatctaaaaaaaaaaaaaaaaaaaaaaaaaaaaaaaaaaaaaaaaaaaaaaaaaaaaaaaaaaaaaaaaaaaaaaaaaaaaaaaaaaaaaaaaaaaaaaaaaaaa

SEQ ID NO: 1010 - RNA, 1799 nt, synthetic construct
  misc_feature 1..1799: note = Artificial____CBFbeta(1-165)_SMMHC(1527-1877) mRNA opt1
  source 1..1799: mol_type = other RNA
aggagagtcccgcagtcggcgtccagcggctctgcttgttcgtgtgtgtgtcgttgcaggccttattcaagcttaccatgccccgcgtggtgccggaccagcggagcaagttcgagaacgaggagttcttccgcaagctgtcccgggagtgcgagatcaagtacacgggcttccgcgaccggccccacgaggagcgccaggcccggttccagaacgcctgccgcgacgggcggagcgagatcgcgttcgtggccaccggcacgaacctgtccctgcagttcttccccgccagctggcagggggagcagcgccagaccccctcccgggagtacgtggacctggagcgcgaggccggcaaggtctacctcaaggccccgatgatcctgaacggggtgtgcgtgatctggaagggctggatcgacctgcagcggctcgacggcatggggtgcctggagttcgacgaggagcgcgcgcagcaggaggacgccctggcccagcaggccttcgaggaggcgcggcgccggacccgcgagttcgaggaccgggaccgcagccaccgggaggagatggaggtccacgagctcgagaagtccaagcgcgccctggagacccagatggaggagatgaagacgcagctggaggagctcgaggacgagctgcaggccaccgaggacgccaagctgcgcctcgaggtgaacatgcaggccctgaagggccagttcgagcgggacctgcaggcgcgcgacgagcagaacgaggagaagcggcgccagctccagcggcagctgcacgagtacgagaccgagctggaggacgagcgcaagcagcgggccctcgccgccgccgcgaagaagaagctggagggggacctgaaggacctcgagctgcaggccgacagcgccatcaagggccgcgaggaggccatcaagcagctgcggaagctccaggcccagatgaaggacttccagcgcgagctggaggacgcgcgggcctcccgcgacgagatcttcgccaccgccaaggagaacgagaagaaggccaagagcctggaggcggacctcatgcagctgcaggaggacctggccgccgccgagcgggcgcgcaagcaggccgacctcgagaaggaggagctggccgaggagctggcctccagcctctccgggcggaacgccctgcaggacgagaagcgccggctggaggcgcgcatcgcccagctcgaggaggagctggaggaggagcagggcaacatggaggccatgagcgaccgggtgcgcaaggccacgcagcaggccgagcagctgtccaacgagctcgcgaccgagcgcagcaccgcccagaagaacgagtccgcccggcagcagctggagcgccagaacaaggagctgcggagcaagctccacgagatggagggcgccgtcaagtccaagttcaagagcaccatcgccgcgctggaggccaagatcgcccagctggaggagcaggtcgagcaggaggcccgcgagaagcaggcggccaccaagagcctgaagcagaaggacaagaagctcaaggagatcctgctccaggtggaggacgagcggaagatggccgagcagtacaaggagcaggccgagaaggggaacgcctgaggactagtccctgttcccagagcccacttttttttctttttttgaaataaaatagcctgtctttcagatctaaaaaaaaaaaaaaaaaaaaaaaaaaaaaaaaaaaaaaaaaaaaaaaaaaaaaaaaaaaaaaaaaaaaaaaaaaaaaaaaaaaaaaaaaaaaaaaaaaaa

SEQ ID NO: 1011 - RNA, 860 nt, synthetic construct
  misc_feature 1..860: note = Artificial____CBFbeta(1-165)_Linker_Lifeact mRNA opt1
  source 1..860: mol_type = other RNA
aggagagtcccgcagtcggcgtccagcggctctgcttgttcgtgtgtgtgtcgttgcaggccttattcaagcttaccatgccccgcgtggtccccgaccagcggagcaagttcgagaacgaggagttcttccgcaagctgtcccgggagtgcgagatcaagtacaccggcttccgcgaccggccccacgaggagcgccaggcccggttccagaacgcctgccgcgacgggcggagcgagatcgcgttcgtggccaccggcacgaacctctccctgcagttcttccccgccagctggcagggggagcagcgccagaccccctcccgggagtacgtggacctggagcgcgaggccggcaaggtctacctcaaggccccgatgatcctgaacggggtgtgcgtgatctggaagggctggatcgacctgcagcggctcgacggcatggggtgcctggagttcgacgaggagcgcgcgcagcaggaggacgccctggcccagcaggccttcgaggaggcgcggcgccggacccgcgagttcgaggaccgggaccgcagccaccgggaggagatggagggcgggtccggcgggagcggcggctccgggggcagcgggggcggcggggtcgccgacctcatcaagaagttcgagtccatcagcaaggaggagggcgacccgcccgtggccacctgaggactagtccctgttcccagagcccacttttttttctttttttgaaataaaatagcctgtctttcagatctaaaaaaaaaaaaaaaaaaaaaaaaaaaaaaaaaaaaaaaaaaaaaaaaaaaaaaaaaaaaaaaaaaaaaaaaaaaaaaaaaaaaaaaaaaaaaaaaaaaa

SEQ ID NO: 1012 - RNA, 827 nt, synthetic construct
  misc_feature 1..827: note = Artificial____CBFbeta(1-165)_HIF1alpha(549-575) mRNA opt1
  source 1..827: mol_type = other RNA
aggagagtcccgcagtcggcgtccagcggctctgcttgttcgtgtgtgtgtcgttgcaggccttattcaagcttaccatgccccgcgtggtcccggaccagcggagcaagttcgagaacgaggagttcttccgcaagctgtcccgggagtgcgagatcaagtacaccggcttccgcgaccggccccacgaggagcgccaggcccggttccagaacgcctgccgcgacgggcggagcgagatcgcgttcgtggccaccggcacgaacctctccctgcagttcttccccgccagctggcagggggagcagcgccagaccccctcccgggagtacgtggacctggagcgcgaggccggcaaggtctacctcaaggccccgatgatcctgaacggggtgtgcgtgatctggaagggctggatcgacctgcagcggctcgacggcatggggtgcctggagttcgacgaggagcgcgcgcagcaggaggacgccctggcccagcaggccttcgaggaggcgcggcgccggacccgcgagttcgaggaccgggaccgcagccaccgggaggagatggagcccttctccacccaggacacggacctcgacctggagatgctggccccctacatccccatggacgacgacttccagctccgctgaggactagtccctgttcccagagcccacttttttttctttttttgaaataaaatagcctgtctttcagatctaaaaaaaaaaaaaaaaaaaaaaaaaaaaaaaaaaaaaaaaaaaaaaaaaaaaaaaaaaaaaaaaaaaaaaaaaaaaaaaaaaaaaaaaaaaaaaaaaaaa

SEQ ID NO: 1013 - RNA, 872 nt, synthetic construct
  misc_feature 1..872: note Artificial____CBFbeta(1-165)_Linker_HIF1alpha(549-575) mRNA opt1
  source 1..872: mol_type = other RNA
aggagagtcccgcagtcggcgtccagcggctctgcttgttcgtgtgtgtgtcgttgcaggccttattcaagcttaccatgccccgcgtggtcccggaccagcggagcaagttcgagaacgaggagttcttccgcaagctgtcccgggagtgcgagatcaagtacaccggcttccgcgaccggccccacgaggagcgccaggcccggttccagaacgcctgccgcgacgggcggagcgagatcgcgttcgtggccaccggcacgaacctctccctgcagttcttccccgccagctggcagggggagcagcgccagaccccctcccgggagtacgtggacctggagcgcgaggccggcaaggtctacctcaaggccccgatgatcctgaacggggtgtgcgtgatctggaagggctggatcgacctgcagcggctcgacggcatggggtgcctggagttcgacgaggagcgcgcgcagcaggaggacgccctggcccagcaggccttcgaggaggcgcggcgccggacccgcgagttcgaggaccgggaccgcagccaccgggaggagatggagggcgggtccggcgggagcggcggctccgggggcagcgggggcggccccttctccacccaggacacggacctcgacctggagatgctggccccctacatccccatggacgacgacttccagctccgctgaggactagtccctgttcccagagcccacttttttttctttttttgaaataaaatagcctgtctttcagatctaaaaaaaaaaaaaaaaaaaaaaaaaaaaaaaaaaaaaaaaaaaaaaaaaaaaaaaaaaaaaaaaaaaaaaaaaaaaaaaaaaaaaaaaaaaaaaaaaaaa

SEQ ID NO: 1014 - RNA, 2507 nt, synthetic construct
  misc_feature 1..2507: note = Artificial____RUNX1(1-177)_N_RUNX1T1a(31-604) mRNA opt1
  source 1..2507: mol_type = other RNA
aggagagtcccgcagtcggcgtccagcggctctgcttgttcgtgtgtgtgtcgttgcaggccttattcaagcttaccatgcgcatccccgtggacgccagcacctcccggcgcttcaccccgcccagcacggccctgtcccccggcaagatgagcgaggcgctccccctgggggccccggacgccggcgccgccctggcggggaagctccggtccggcgaccgcagcatggtcgaggtgctggccgaccaccccggggagctggtgcggaccgactcccccaacttcctctgcagcgtcctgcccacccactggcgctgcaacaagaccctgccgatcgccttcaaggtggtggccctcggcgacgtccccgacggcacgctggtgaccgtgatggcggggaacgacgagaactactccgccgagctgcggaacgccaccgccgccatgaagaaccaggtcgcgcgcttcaacgacctccggttcgtgggccgcagcgggcggggcaagtccttcaccctgacgatcaccgtgttcaccaaccccccccaggtcgccacctaccaccgcgccatcaagatcacggtggacgggccgcgggagccccgcaaccggaccgagaagcacagcaccatgcccgactcccccgtggacgtcaagacccagagccgcctgacgccgcccaccatgccccccccgcccaccacccagggcgccccccggacgtccagcttcacccccaccaccctcacgaacggcacctcccacagcccgaccgccctgaacggggcgccctccccccccaacggcttcagcaacgggccgagctccagctccagctccagcctggccaaccagcagctcccccccgcctgcggcgcccgccagctgtccaagctgaagcggttcctcaccacgctgcagcagttcggcaacgacatcagcccggagatcggggagcgcgtgcggaccctggtgctcggcctggtcaactccaccctgaccatcgaggagttccacagcaagctccaggaggccacgaacttccccctgcgccccttcgtgatccccttcctgaaggcgaacctcccgctgctgcagcgcgagctcctgcactgcgcccggctggccaagcagaaccccgcccagtacctcgcccagcacgagcagctgctgctcgacgcgtccaccaccagccccgtggactccagcgagctgctgctcgacgtcaacgagaacgggaagcgccggacccccgaccgcacgaaggagaacggcttcgaccgggagccgctgcactccgagcaccccagcaagcgcccctgcaccatctcccccgggcagcggtacagcccgaacaacggcctgtcctaccagcccaacggcctcccccaccccaccccgccccccccccagcactaccgcctggacgacatggccatcgcccaccactaccgggacagctaccgccacccgagccaccgggacctgcgcgaccggaaccgccccatggggctgcacggcacccggcaggaggagatgatcgaccaccgcctcaccgaccgggagtgggccgaggagtggaagcacctggaccacctgctcaactgcatcatggacatggtggagaagacgcgccggtccctgaccgtgctgcgccgctgccaggaggcggaccgggaggagctcaactactggatccgccggtacagcgacgccgaggacctgaagaaggggggcgggtccagctccagccactcccgccagcagagccccgtcaaccccgacccggtggccctggacgcccaccgggagttcctccaccgccccgcctccggctacgtccccgaggagatctggaagaaggcggaggaggccgtgaacgaggtgaagcggcaggccatgaccgagctgcagaaggccgtcagcgaggccgagcgcaaggcgcacgacatgatcaccacggagcgggccaagatggagcgcaccgtggccgaggccaagcggcaggccgcggaggacgccctggccgtgatcaaccagcaggaggactccagcgagtcctgctggaactgcggccgcaaggccagcgagacctgctccgggtgcaacaccgcgcggtactgcggcagcttctgccagcacaaggactgggagaagcaccaccacatctgcgggcagacgctccaggcccagcagcagggcgacaccccggccgtctccagcagcgtgacccccaactccggggccggcagccccatggacacccccccggccgcgacgccccgctccaccacccccggcacccccagcacgatcgagaccaccccgcggtgaggactagtccctgttcccagagcccacttttttttctttttttgaaataaaatagcctgtctttcagatctaaaaaaaaaaaaaaaaaaaaaaaaaaaaaaaaaaaaaaaaaaaaaaaaaaaaaaaaaaaaaaaaaaaaaaaaaaaaaaaaaaaaaaaaaaaaaaaaaaaa

SEQ ID NO: 1015 - RNA, 1022 nt, synthetic construct
  misc_feature 1..1022: note = Artificial____RUNX1(1-241)_RUNX1T1b(short) mRNA opt1
  source 1..1022: mol_type = other RNA
aggagagtcccgcagtcggcgtccagcggctctgcttgttcgtgtgtgtgtcgttgcaggccttattcaagcttaccatgcgcatccccgtggacgccagcacctcccggcgcttcaccccgcccagcacggccctgtcccccggcaagatgagcgaggcgctccccctgggggccccggacgccggcgccgccctggcggggaagctccggtccggcgaccgcagcatggtcgaggtgctggccgaccaccccggggagctggtgcggaccgactcccccaacttcctctgcagcgtcctgcccacccactggcgctgcaacaagaccctgccgatcgccttcaaggtggtggccctcggcgacgtccccgacggcacgctggtgaccgtgatggcggggaacgacgagaactactccgccgagctgcggaacgccaccgccgccatgaagaaccaggtcgcgcgcttcaacgacctccggttcgtgggccgcagcgggcggggcaagtccttcaccctgacgatcaccgtgttcaccaacccgccccaggtcgccacctaccaccgcgccatcaagatcacggtggacgggccccgggagccccgccggcaccgccagaagctggacgaccagaccaagcccggcagcctctccttcagcgagcggctgtccgagctggagcagctccgccggaccgccatgcgcgtgagcccccaccacccggcccccacccccaacccccgggcgtccctgaaccacagcacggccttcaacccgcagccccagtcccagatgcaggaggtcggcttctgccacgtggcccaggtggggctgaagctcctgggctgaggactagtccctgttcccagagcccacttttttttctttttttgaaataaaatagcctgtctttcagatctaaaaaaaaaaaaaaaaaaaaaaaaaaaaaaaaaaaaaaaaaaaaaaaaaaaaaaaaaaaaaaaaaaaaaaaaaaaaaaaaaaaaaaaaaaaaaaaaaaaa

SEQ ID NO: 1016 - RNA, 2726 nt, synthetic construct
  misc_feature 1..2726: note = Artificial____RUNX1(1-241)_V_RUNX1T1b(22-604) mRNA opt1
  source 1..2726: mol_type = other RNA
aggagagtcccgcagtcggcgtccagcggctctgcttgttcgtgtgtgtgtcgttgcaggccttattcaagcttaccatgcgcatccccgtggacgccagcacctcccggcgcttcaccccgcccagcacggccctgtcccccggcaagatgagcgaggcgctccccctgggggccccggacgccggcgccgccctggcggggaagctccggtccggcgaccgcagcatggtcgaggtgctggccgaccaccccggggagctggtgcggaccgactcccccaacttcctctgcagcgtcctgcccacccactggcgctgcaacaagaccctgccgatcgccttcaaggtggtggccctcggcgacgtccccgacggcacgctggtgaccgtgatggcggggaacgacgagaactactccgccgagctgcggaacgccaccgccgccatgaagaaccaggtcgcgcgcttcaacgacctccggttcgtgggccgcagcgggcggggcaagtccttcaccctgacgatcaccgtgttcaccaacccgccccaggtcgccacctaccaccgcgccatcaagatcacggtggacgggccccgggagccccgccggcaccgccagaagctggacgaccagaccaagcccggcagcctctccttcagcgagcggctgtccgagctggagcagctccgccggaccgccatgcgcgtgagcccccaccacccggcccccacccccaacccccgggcgtccctgaaccacagcacggccttcaacccgcagccccagtcccagatgcaggtcggccccgagaagcgcgtgcccgccatgccggggagccccgtggaggtcaagatccagagccgctccagcccgcccaccatgccgcccctgcccccgatcaaccccggcgggccccggcccgtgtccttcacccccaccgccctcagcaacggcatcaaccactccccgcccacgctgaacggcgcccccagcccgccccagcgcttctccaacgggcccgcgagctccaccagctccgccctgaccaaccagcagctccccgcgacctgcggcgcccggcagctgagcaagctgaagcgcttcctcacgaccctgcagcagttcgggaacgacatctcccccgagatcggcgagaaggtgcggaccctggtcctcgccctggtgaacagcaccgtgacgatcgaggagttccactgcaagctgcaggaggccaccaacttccccctccgccccttcgtcatccccttcctgaaggccaacctgccgctcctgcagcgggagctgctccactgcgcccgcgccgcgaagcagaccccctcccagtacctggcccagcacgagcacctcctgctgaacaccagcatcgcctcccccgccgacagctccgagctgctcatggaggtgcacgggaacggcaagcggcccagcccggagcgccgggaggagaacagcttcgaccgcgacacgatcgcccccgagccgcccgcgaagcgggtctgcaccatctcccccgcgccccgccacagccccgccctgaccgtgccgctgatgaaccccggcgggcagttccaccccacgcccccgcccctgcagcactacaccctcgaggacatcgccacctcccacctgtaccgggagcccaacaagatgctggagcaccgcgaggtgcgggaccgccaccacagcctcggcctgaacgggggctaccaggacgagctggtcgaccaccggctcaccgagcgcgagtgggccgacgagtggaagcacctggaccacgccctgaactgcatcatggagatggtggagaagacccgccggtccatggccgtgctccgccggtgccaggagagcgaccgcgaggagctgaactactggaagcggcgctacaacgagaacaccgagctgcggaagacggggaccgagctcgtctcccgccagcacagccccggctccgccgacagcctgtccaacgacagccagcgggagttcaactcccgcccgggcaccgggtacgtgcccgtggagttctggaagaagaccgaggaggccgtcaacaaggtgaagatccaggccatgagcgaggtgcagaaggcggtcgccgaggccgagcagaaggccttcgaggtgatcgcgacggagcgggcccgcatggagcagaccatcgccgacgtgaagcggcaggccgccgaggacgcgttcctggtcatcaacgagcaggaggagtccaccgagaactgctggaactgcggccgcaaggccagcgagacctgctccgggtgcaacatcgcccggtactgcggcagcttctgccagcacaaggactgggagcgccaccaccggctctgcgggcagaacctgcacggccagagcccccacggccaggggcgccccctgctcccggtgggccgggggtccagcgcccgctccgccgactgcagcgtgccctcccccgcgctggacaagacgagcgccaccacctcccggagctccacccccgccagcgtcacggccatcgacaccaacggcctgtgaggactagtccctgttcccagagcccacttttttttctttttttgaaataaaatagcctgtctttcagatctaaaaaaaaaaaaaaaaaaaaaaaaaaaaaaaaaaaaaaaaaaaaaaaaaaaaaaaaaaaaaaaaaaaaaaaaaaaaaaaaaaaaaaaaaaaaaaaaaaaa

SEQ ID NO: 1017 - RNA, 2726 nt, synthetic construct
  misc_feature 1..2726: note = Artificial____RUNX1(1-241)_I_RUNX1T1b(22-604) mRNA opt1
  source 1..2726: mol_type = other RNA
aggagagtcccgcagtcggcgtccagcggctctgcttgttcgtgtgtgtgtcgttgcaggccttattcaagcttaccatgcgcatccccgtggacgccagcacctcccggcgcttcaccccgcccagcacggccctgtcccccggcaagatgagcgaggcgctccccctgggggccccggacgccggcgccgccctggcggggaagctccggtccggcgaccgcagcatggtcgaggtgctggccgaccaccccggggagctggtgcggaccgactcccccaacttcctctgcagcgtcctgcccacccactggcgctgcaacaagaccctgccgatcgccttcaaggtggtggccctcggcgacgtccccgacggcacgctggtgaccgtgatggcggggaacgacgagaactactccgccgagctgcggaacgccaccgccgccatgaagaaccaggtcgcgcgcttcaacgacctccggttcgtgggccgcagcgggcggggcaagtccttcaccctgacgatcaccgtgttcaccaacccgccccaggtcgccacctaccaccgcgccatcaagatcacggtggacgggccccgggagccccgccggcaccgccagaagctggacgaccagaccaagcccggcagcctctccttcagcgagcggctgtccgagctggagcagctccgccggaccgccatgcgcgtgagcccccaccacccggcccccacccccaacccccgggcgtccctgaaccacagcacggccttcaacccgcagccccagtcccagatgcagatcggccccgagaagcgcgtccccgccatgccggggagccccgtggaggtgaagatccagagccgctccagcccgcccaccatgccgcccctgcccccgatcaaccccggcgggccccggcccgtctccttcacccccaccgccctcagcaacggcatcaaccactccccgcccacgctgaacggcgcccccagcccgccccagcgcttctccaacgggcccgcgagctccaccagctccgccctgaccaaccagcagctccccgcgacctgcggcgcccggcagctgagcaagctgaagcgcttcctcacgaccctgcagcagttcgggaacgacatctcccccgagatcggcgagaaggtgcggaccctggtgctcgccctggtcaacagcaccgtgacgatcgaggagttccactgcaagctgcaggaggccaccaacttccccctccgccccttcgtgatccccttcctgaaggccaacctgccgctcctgcagcgggagctgctccactgcgcccgcgccgcgaagcagaccccctcccagtacctggcccagcacgagcacctcctgctgaacaccagcatcgcctcccccgccgacagctccgagctgctcatggaggtccacgggaacggcaagcggcccagcccggagcgccgggaggagaacagcttcgaccgcgacacgatcgcccccgagccgcccgcgaagcgggtgtgcaccatctcccccgcgccccgccacagccccgccctgaccgtcccgctgatgaaccccggcgggcagttccaccccacgcccccgcccctgcagcactacaccctcgaggacatcgccacctcccacctgtaccgggagcccaacaagatgctggagcaccgcgaggtgcgggaccgccaccacagcctcggcctgaacgggggctaccaggacgagctggtggaccaccggctcaccgagcgcgagtgggccgacgagtggaagcacctggaccacgccctgaactgcatcatggagatggtcgagaagacccgccggtccatggccgtgctccgccggtgccaggagagcgaccgcgaggagctgaactactggaagcggcgctacaacgagaacaccgagctgcggaagacggggaccgagctcgtgtcccgccagcacagccccggctccgccgacagcctgtccaacgacagccagcgggagttcaactcccgcccgggcaccgggtacgtccccgtggagttctggaagaagaccgaggaggccgtgaacaaggtcaagatccaggccatgagcgaggtgcagaaggcggtggccgaggccgagcagaaggccttcgaggtcatcgcgacggagcgggcccgcatggagcagaccatcgccgacgtgaagcggcaggccgccgaggacgcgttcctggtgatcaacgagcaggaggagtccaccgagaactgctggaactgcggccgcaaggccagcgagacctgctccgggtgcaacatcgcccggtactgcggcagcttctgccagcacaaggactgggagcgccaccaccggctctgcgggcagaacctgcacggccagagcccccacggccaggggcgccccctgctcccggtcggccgggggtccagcgcccgctccgccgactgcagcgtgccctcccccgcgctggacaagacgagcgccaccacctcccggagctccacccccgccagcgtgacggccatcgacaccaacggcctgtgaggactagtccctgttcccagagcccacttttttttctttttttgaaataaaatagcctgtctttcagatctaaaaaaaaaaaaaaaaaaaaaaaaaaaaaaaaaaaaaaaaaaaaaaaaaaaaaaaaaaaaaaaaaaaaaaaaaaaaaaaaaaaaaaaaaaaaaaaaaaaa

SEQ ID NO: 1018 - RNA, 1610 nt, synthetic construct
  misc_feature 1..1610: note = Homo sapiens__Q01196-1__RUNX1(K83E_R174Q) mRNA opt3
  source 1..1610: mol_type = other RNA
aggagagtcccgcagtcggcgtccagcggctctgcttgttcgtgtgtgtgtcgttgcaggccttattcaagcttaccatgagaatccccgtggatgccagcaccagcagaagattcacccctcctagcaccgctctgagccctggcaagatgtctgaagctctgcctctgggagcacctgatgctggtgcagctctggccggaaaactgagaagcggcgacagatccatggtggaagtgctggctgatcaccccggcgaacttgtgcggacagacagccctaatttcctgtgcagcgtgctgcctacacactggcggtgcaatgagacactgcctatcgccttcaaggtggtggccctgggagatgtgcctgatggcacactggttacagtgatggccggcaacgacgagaactacagcgccgagctgagaaatgccaccgccgccatgaagaaccaggtggccagattcaacgacctgagattcgtgggcagaagcggcaggggcaagagctttaccctgaccatcaccgtgttcaccaatcctccacaggtggcaacctaccaccgggccatcaagatcacagtggacggccctcaagagcccagacggcacagacagaaactggacgaccagaccaagcctggcagcctgagctttagcgagagactgagcgagctggaacagctgagaagaaccgccatgcgggtgtccccacatcaccctgctcctacacctaatcctcgggccagcctgaatcacagcaccgcctttaatccccagcctcagagccagatgcaggacaccagacagattcagccttctccaccttggagctacgaccagagctaccagtacctgggctctatcgcctctcctagcgtgcaccctgccacacctattagtcctggcagagccagcggcatgacaacactgtctgccgagctgtccagcagactgagcacagcccctgatctgaccgccttcagcgaccctagacagttccctgctctgcccagcatctctgaccccagaatgcattaccctggcgccttcacatacagccccacacctgtgacaagcggcatcggcattggcatgtctgccatgggaagcgccaccagataccacacctacctgcctccaccttatcctggcagctctcaggctcaaggcggcccttttcaggccagctctccttcctaccacctgtactatggcgccagcgccggctcctaccagttttctatggttggaggcgagcggagccctcctagaatcctgcctccttgtaccaacgccagcacaggatctgccctgctgaatcccagcctgcctaatcagagcgacgtggtggaagccgagggcagccatagcaacagccctaccaatatggcccctagcgccagactggaagaggccgtttggaggccttactgaggactagtccctgttcccagagcccacttttttttctttttttgaaataaaatagcctgtctttcagatctaaaaaaaaaaaaaaaaaaaaaaaaaaaaaaaaaaaaaaaaaaaaaaaaaaaaaaaaaaaaaaaaaaaaaaaaaaaaaaaaaaaaaaaaaaaaaaaaaaaa

SEQ ID NO: 1019 - RNA, 2084 nt, synthetic construct
  misc_feature 1..2084: note = Homo sapiens____CBFbeta(1-165)_SMMHC(1527-1972) mRNA opt3
  source 1..2084: mol_type = other RNA
aggagagtcccgcagtcggcgtccagcggctctgcttgttcgtgtgtgtgtcgttgcaggccttattcaagcttaccatgcctagagtggtgcccgaccagagaagcaagttcgagaacgaagagttctttcggaagctgagcagagagtgcgagatcaagtacaccggcttccgggacagaccccacgaagaaagacaggccagattccagaacgcctgcagagatggcagatccgagatcgcctttgtggccaccggcaccaatctgagcctgcagttctttccagcctcctggcagggcgagcagagacaaacacccagcagagaatacgtggacctggaacgcgaggccggcaaggtgtacctgaaggcccctatgatcctgaacggcgtgtgcgtgatctggaaaggctggatcgatctgcagcggctggatggcatgggctgcctggaatttgacgaggaaagagcccagcaagaggacgcccttgctcagcaggcctttgaggaagccagaaggcggaccagagagttcgaggacagagacagatcccaccgggaagagatggaagtgcacgagctggaaaagagcaagagagccctggaaacccagatggaagaaatgaagacccagctcgaggaactcgaggacgagctgcaggccacagaggatgccaagctgagactggaagtgaacatgcaggccctgaagggccagttcgagagagatctgcaggctagggacgagcagaacgaggaaaagcggagacagctgcagaggcagctgcacgagtacgagacagagctggaagatgagcggaagcagagagcactggccgctgccgccaagaagaaactggaaggcgacctgaaggatctggaactccaggccgacagcgccatcaagggaagagaagaggccatcaagcagctgcggaagctgcaagcccagatgaaggacttccagcgcgagttggaagatgccagagccagcagggatgagatcttcgccaccgccaaagagaacgagaagaaggccaagagcctggaagccgatctgatgcagctccaagaggatctggctgccgccgagagagccagaaaacaggccgacctggaaaaagaggaactggccgaagaactggccagcagcctgtctggcagaaacgctctgcaggacgagaagagaaggctggaagccaggatcgcccagttggaggaagaactcgaagaggaacagggcaacatggaagccatgagcgacagagtgcggaaggccacacagcaggctgagcagctgagcaatgagctggccaccgagagaagcacagcccagaagaatgagagcgccaggcagcagctcgagcggcagaacaaagagctgagaagcaaactgcacgaaatggaaggggccgtgaagtccaagttcaagagcacaatcgccgctctcgaggccaagatcgctcagctcgaagaacaggtggaacaagaggcccgggaaaagcaggccgccacaaagtctctgaagcagaaggacaagaagctgaaagaaatcctgctgcaggtcgaggatgagagaaagatggccgagcagtacaaagaacaggctgagaagggcaacgccagagtgaagcagctgaaacggcaactggaagaggccgaggaagagtcccagagaatcaacgccaacagacggaaactgcagagagagctggacgaagccaccgagtccaatgaggccatgggcagagaagtgaacgccctgaagtctaagctgcggagaggcaacgaaaccagcttcgtgcccagcagaagatccggcggcagaagagtgatcgagaacgccgatggctctgaggaagaaaccgacaccagagatgccgacttcaacggcacaaaggccagcgagtaaggactagtccctgttcccagagcccacttttttttctttttttgaaataaaatagcctgtctttcagatctaaaaaaaaaaaaaaaaaaaaaaaaaaaaaaaaaaaaaaaaaaaaaaaaaaaaaaaaaaaaaaaaaaaaaaaaaaaaaaaaaaaaaaaaaaaaaaaaaaaa

SEQ ID NO: 1020 - RNA, 1799 nt, synthetic construct
  misc_feature 1..1799: note = Artificial____CBFbeta(1-165)_SMMHC(1527-1877) mRNA opt3
  source 1..1799: mol_type = other RNA
aggagagtcccgcagtcggcgtccagcggctctgcttgttcgtgtgtgtgtcgttgcaggccttattcaagcttaccatgcctagagtggtgcccgaccagagaagcaagttcgagaacgaagagttctttcggaagctgagcagagagtgcgagatcaagtacaccggcttccgggacagaccccacgaagaaagacaggccagattccagaacgcctgcagagatggcagatccgagatcgcctttgtggccaccggcaccaatctgagcctgcagttctttccagcctcctggcagggcgagcagagacaaacacccagcagagaatacgtggacctggaacgcgaggccggcaaggtgtacctgaaggcccctatgatcctgaacggcgtgtgcgtgatctggaaaggctggatcgatctgcagcggctggatggcatgggctgcctggaatttgacgaggaaagagcccagcaagaggacgcccttgctcagcaggcctttgaggaagccagaaggcggaccagagagttcgaggacagagacagatcccaccgggaagagatggaagtgcacgagctggaaaagagcaagagagccctggaaacccagatggaagaaatgaagacccagctcgaggaactcgaggacgagctgcaggccacagaggatgccaagctgagactggaagtgaacatgcaggccctgaagggccagttcgagagagatctgcaggctagggacgagcagaacgaggaaaagcggagacagctgcagaggcagctgcacgagtacgagacagagctggaagatgagcggaagcagagagcactggccgctgccgccaagaagaaactggaaggcgacctgaaggatctggaactccaggccgacagcgccatcaagggaagagaagaggccatcaagcagctgcggaagctgcaagcccagatgaaggacttccagcgcgagttggaagatgccagagccagcagggatgagatcttcgccaccgccaaagagaacgagaagaaggccaagagcctggaagccgatctgatgcagctccaagaggatctggctgccgccgagagagccagaaaacaggccgacctggaaaaagaggaactggccgaagaactggccagcagcctgtctggcagaaacgctctgcaggacgagaagagaaggctggaagccaggatcgcccagttggaggaagaactcgaagaggaacagggcaacatggaagccatgagcgacagagtgcggaaggccacacagcaggctgagcagctgagcaatgagctggccaccgagagaagcacagcccagaagaatgagagcgccaggcagcagctcgagcggcagaacaaagagctgagaagcaaactgcacgaaatggaaggggccgtgaagtccaagttcaagagcacaatcgccgctctcgaggccaagatcgctcagctcgaagaacaggtggaacaagaggcccgggaaaagcaggccgccacaaagtctctgaagcagaaggacaagaagctgaaagaaatcctgctgcaggtcgaggatgagagaaagatggccgagcagtacaaagaacaggctgagaagggcaacgcctgaggactagtccctgttcccagagcccacttttttttctttttttgaaataaaatagcctgtctttcagatctaaaaaaaaaaaaaaaaaaaaaaaaaaaaaaaaaaaaaaaaaaaaaaaaaaaaaaaaaaaaaaaaaaaaaaaaaaaaaaaaaaaaaaaaaaaaaaaaaaaa

SEQ ID NO: 1021 - RNA, 860 nt, synthetic construct
  misc_feature 1..860: note = Artificial____CBFbeta(1-165)_Linker_Lifeact mRNA opt3
  source 1..860: mol_type = other RNA
aggagagtcccgcagtcggcgtccagcggctctgcttgttcgtgtgtgtgtcgttgcaggccttattcaagcttaccatgcctagagtggtgcccgaccagagaagcaagttcgagaacgaagagttctttcggaagctgagcagagagtgcgagatcaagtacaccggcttccgggacagaccccacgaagaaagacaggccagattccagaacgcctgcagagatggcagatccgagatcgcctttgtggccaccggcaccaatctgagcctgcagttctttccagcctcctggcagggcgagcagagacaaacacccagcagagaatacgtggacctggaacgcgaggccggcaaggtgtacctgaaggcccctatgatcctgaacggcgtgtgcgtgatctggaaaggctggatcgatctgcagcggctggatggcatgggctgcctggaatttgacgaggaaagagcccagcaagaggacgcccttgctcagcaggcctttgaggaagccagaaggcggaccagagagttcgaggacagagacagatcccaccgggaagagatggaaggcggatctggtggaagcggaggtagcggaggatcaggcggaggcggagttgccgatctgatcaagaagttcgagtccatcagcaaagaagagggcgaccctccagtggccacatgaggactagtccctgttcccagagcccacttttttttctttttttgaaataaaatagcctgtctttcagatctaaaaaaaaaaaaaaaaaaaaaaaaaaaaaaaaaaaaaaaaaaaaaaaaaaaaaaaaaaaaaaaaaaaaaaaaaaaaaaaaaaaaaaaaaaaaaaaaaaaa

SEQ ID NO: 1022 - RNA, 827 nt, synthetic construct
  misc_feature 1..827: note = Artificial____CBFbeta(1-165)_HIF1alpha(549-575) mRNA opt3
  source 1..827: mol_type = other RNA
aggagagtcccgcagtcggcgtccagcggctctgcttgttcgtgtgtgtgtcgttgcaggccttattcaagcttaccatgcctagagtggtgcccgaccagagaagcaagttcgagaacgaagagttctttcggaagctgagcagagagtgcgagatcaagtacaccggcttccgggacagaccccacgaagaaagacaggccagattccagaacgcctgcagagatggcagatccgagatcgcctttgtggccaccggcaccaatctgagcctgcagttctttccagcctcctggcagggcgagcagagacaaacacccagcagagaatacgtggacctggaacgcgaggccggcaaggtgtacctgaaggcccctatgatcctgaacggcgtgtgcgtgatctggaaaggctggatcgatctgcagcggctggatggcatgggctgcctggaatttgacgaggaaagagcccagcaagaggacgcccttgctcagcaggcctttgaggaagccagaaggcggaccagagagttcgaggacagagacagatcccaccgggaagagatggaacccttcagcacccaagacaccgacctggacctcgaaatgctggccccttacatccccatggacgacgacttccagctgcggtaaggactagtccctgttcccagagcccacttttttttctttttttgaaataaaatagcctgtctttcagatctaaaaaaaaaaaaaaaaaaaaaaaaaaaaaaaaaaaaaaaaaaaaaaaaaaaaaaaaaaaaaaaaaaaaaaaaaaaaaaaaaaaaaaaaaaaaaaaaaaaa

SEQ ID NO: 1023 - RNA, 872 nt, synthetic construct
  misc_feature 1..872: note Artificial____CBFbeta(1-165)_Linker_HIF1alpha(549-575) mRNA opt3
  source 1..872: mol_type = other RNA
aggagagtcccgcagtcggcgtccagcggctctgcttgttcgtgtgtgtgtcgttgcaggccttattcaagcttaccatgcctagagtggtgcccgaccagagaagcaagttcgagaacgaagagttctttcggaagctgagcagagagtgcgagatcaagtacaccggcttccgggacagaccccacgaagaaagacaggccagattccagaacgcctgcagagatggcagatccgagatcgcctttgtggccaccggcaccaatctgagcctgcagttctttccagcctcctggcagggcgagcagagacaaacacccagcagagaatacgtggacctggaacgcgaggccggcaaggtgtacctgaaggcccctatgatcctgaacggcgtgtgcgtgatctggaaaggctggatcgatctgcagcggctggatggcatgggctgcctggaatttgacgaggaaagagcccagcaagaggacgcccttgctcagcaggcctttgaggaagccagaaggcggaccagagagttcgaggacagagacagatcccaccgggaagagatggaaggcggatctggtggaagcggaggtagcggaggatctggcggaggacctttcagcacccaagacaccgacctggacctcgaaatgctggccccttacatccccatggacgacgacttccagctgcggtaaggactagtccctgttcccagagcccacttttttttctttttttgaaataaaatagcctgtctttcagatctaaaaaaaaaaaaaaaaaaaaaaaaaaaaaaaaaaaaaaaaaaaaaaaaaaaaaaaaaaaaaaaaaaaaaaaaaaaaaaaaaaaaaaaaaaaaaaaaaaaa

SEQ ID NO: 1024 - RNA, 2507 nt, synthetic construct
  misc_feature 1..2507: note = Artificial____RUNX1(1-177)_N_RUNX1T1a(31-604) mRNA opt3
  source 1..2507: mol_type = other RNA
aggagagtcccgcagtcggcgtccagcggctctgcttgttcgtgtgtgtgtcgttgcaggccttattcaagcttaccatgagaatccccgtggatgccagcaccagcagaagattcacccctcctagcaccgctctgagccctggcaagatgtctgaagctctgcctctgggagcacctgatgctggtgcagctctggccggaaaactgagaagcggcgacagatccatggtggaagtgctggctgatcaccccggcgaacttgtgcggacagacagccctaatttcctgtgcagcgtgctgcctacacactggcggtgcaacaagacactgcctatcgccttcaaggtggtggctctgggagatgtgcctgatggcacactggtcacagtgatggccggcaacgacgagaattacagcgccgagctgagaaatgccaccgccgccatgaagaaccaggtggccagattcaacgacctgagattcgtgggcagaagcggcaggggcaagagctttaccctgaccatcaccgtgttcaccaatcctccacaggtggcaacctaccaccgggccatcaagatcaccgtggatggccctagagagccccggaacagaacagagaagcacagcaccatgcctgacagccccgtggacgtgaaaacccagagcagactgacccctccaaccatgcctcctccacctacaacacagggcgctcctagaaccagcagcttcacccctaccacactgaccaacggcacctctcacagccccacagctcttaatggcgccccttctccacctaacggcttcagcaatggcccaagcagcagcagctctagcagcctggctaatcagcagctgcctcctgcttgtggcgctagacagctgagcaagctgaagcggttcctgaccacactgcagcagttcggcaacgatatcagccccgagatcggcgagcgcgtcagaacactggttctgggcctcgtgaatagcaccctgacaatcgaagagttccacagcaagctgcaagaggccaccaactttccgctgcggcctttcgtgatcccattcctgaaggccaacctgcctctgctgcagagagaactgctccactgcgccagactggccaagcagaaccctgctcagtatctggcccagcacgagcaactgctgctggacgcctctacaacaagccctgtggatagcagcgagctgctcctggatgtgaacgagaacggcaagcggagaacccctgaccggaccaaagagaacggcttcgacagagagcctctgcacagcgagcaccccagcaaaagaccctgcacaatcagccctggccagcggtactctcccaacaacggcctgagctaccagcctaacggactgccccatcctacacctccacctccacagcactaccggctggacgatatggctatcgcccaccactaccgggacagctacagacaccctagccaccgggacctgcgggacagaaatagacctatgggcctgcacggcacccggcaagaggaaatgattgaccaccggctgaccgacagagaatgggccgaagagtggaagcacctggaccatctgctgaactgcatcatggatatggtggaaaagacccggcggagcctgaccgtgctgagaagatgtcaagaggccgatagagaggaactgaactactggatccggcggtacagcgacgccgaggatcttaagaaaggcggcggatctagcagcagccacagcagacagcagagccccgtgaatcctgatcctgtggcactggatgcccacagagaatttctgcacagacccgccagcggctacgtgccagaggaaatctggaagaaagccgaagaggccgtgaacgaagtgaagagacaggccatgaccgaactgcagaaagccgtgtctgaggccgagagaaaggcccacgatatgatcacaaccgagcgggccaagatggaaagaacagtggccgaggccaaaagacaggccgccgaagatgctctggctgtgatcaatcagcaagaggacagcagcgagtcctgctggaactgtggcagaaaggccagcgagacatgcagcggctgtaacaccgccagatattgcggcagcttctgccagcacaaggactgggagaagcaccaccacatctgcggccagacactgcaggctcagcagcaaggcgatactcctgccgtgtctagcagcgtgacccctaattctggcgccggatctcccatggatacccctccagctgccacacctagaagcacaacccctggcacacccagcaccatcgagacaacccctagatgaggactagtccctgttcccagagcccacttttttttctttttttgaaataaaatagcctgtctttcagatctaaaaaaaaaaaaaaaaaaaaaaaaaaaaaaaaaaaaaaaaaaaaaaaaaaaaaaaaaaaaaaaaaaaaaaaaaaaaaaaaaaaaaaaaaaaaaaaaaaaa

SEQ ID NO: 1025 - RNA, 1022 nt, synthetic construct
  misc_feature 1..1022: note = Artificial____RUNX1(1-241)_RUNX1T1b(short) mRNA opt3
  source 1..1022: mol_type = other RNA
aggagagtcccgcagtcggcgtccagcggctctgcttgttcgtgtgtgtgtcgttgcaggccttattcaagcttaccatgagaatccccgtggatgccagcaccagcagaagattcacccctcctagcaccgctctgagccctggcaagatgtctgaagctctgcctctgggagcacctgatgctggtgcagctctggccggaaaactgagaagcggcgacagatccatggtggaagtgctggctgatcaccccggcgaacttgtgcggacagacagccctaatttcctgtgcagcgtgctgcctacacactggcggtgcaacaagacactgcctatcgccttcaaggtggtggctctgggagatgtgcctgatggcacactggtcacagtgatggccggcaacgacgagaattacagcgccgagctgagaaatgccaccgccgccatgaagaaccaggtggccagattcaacgacctgagattcgtgggcagaagcggcaggggcaagagctttaccctgaccatcaccgtgttcaccaatcctccacaggtggcaacctaccaccgggccatcaagatcaccgtggatggccctagagagcccagacggcacagacagaaactggacgaccagaccaagcctggcagcctgagctttagcgagagactgagcgagctggaacagctgagaagaaccgccatgcgggtgtccccacatcaccctgctcctacacctaatcctcgggccagcctgaatcacagcaccgcctttaatccccagcctcagagccagatgcaagaagtgggcttctgtcacgtggcccaagtgggactgaagctgctgggataaggactagtccctgttcccagagcccacttttttttctttttttgaaataaaatagcctgtctttcagatctaaaaaaaaaaaaaaaaaaaaaaaaaaaaaaaaaaaaaaaaaaaaaaaaaaaaaaaaaaaaaaaaaaaaaaaaaaaaaaaaaaaaaaaaaaaaaaaaaaaa

SEQ ID NO: 1026 - RNA, 2726 nt, synthetic construct
  misc_feature 1..2726: note = Artificial____RUNX1(1-241)_V_RUNX1T1b(22-604) mRNA opt3
  source 1..2726: mol_type = other RNA
aggagagtcccgcagtcggcgtccagcggctctgcttgttcgtgtgtgtgtcgttgcaggccttattcaagcttaccatgagaatccccgtggatgccagcaccagcagaagattcacccctcctagcaccgctctgagccctggcaagatgtctgaagctctgcctctgggagcacctgatgctggtgcagctctggccggaaaactgagaagcggcgacagatccatggtggaagtgctggctgatcaccccggcgaacttgtgcggacagacagccctaatttcctgtgcagcgtgctgcctacacactggcggtgcaacaagacactgcctatcgccttcaaggtggtggctctgggagatgtgcctgatggcacactggtcacagtgatggccggcaacgacgagaattacagcgccgagctgagaaatgccaccgccgccatgaagaaccaggtggccagattcaacgacctgagattcgtgggcagaagcggcaggggcaagagctttaccctgaccatcaccgtgttcaccaatcctccacaggtggcaacctaccaccgggccatcaagatcaccgtggatggccctagagagcccagacggcacagacagaaactggacgaccagaccaagcctggcagcctgagctttagcgagagactgagcgagctggaacagctgagaagaaccgccatgcgggtgtccccacatcaccctgctcctacacctaatcctcgggccagcctgaatcacagcaccgcctttaatccccagcctcagagccagatgcaagtgggccctgagaaaagggtgccagccatgcctggaagccccgtggaagtgaagatccagagcagatctagccctcctaccatgcctcctctgcctccaatcaatcctggcggccctagacctgtgtccttcacacctaccgctctgtccaacggcatcaatcacagccctccaacactgaatggcgccccatctccacctcagcggttttctaatggccctgccagcagcacaagcagcgccctgacaaatcagcagctgcctgctacatgtggcgccagacagctgagcaagctgaagcggtttctgaccacactgcagcagttcggcaacgatatcagccccgagatcggcgagaaagtgcggacactggttctggccctggtcaacagcaccgtgaccatcgaagagttccactgcaagctgcaagaggccaccaactttccgctgcggcctttcgtgatcccattcctgaaggccaacctgcctctgctgcagagagagctgctgcattgcgccagagccgccaagcagacaccttctcagtatctggcccagcacgagcatctgctgctgaacacctctatcgcctctccagccgatagcagcgagctgctcatggaagtgcacggcaacggaaagaggccctctccagagcggagagaggaaaacagcttcgaccgggacacaatcgcccctgagcctccagccaagagagtgtgcacaatcagcccagctcctagacacagccccgctctgacagtgccccttatgaaccctggcggacagtttcaccccacacctccaccactccagcactacaccctggaagatatcgccaccagccacctgtaccgcgagcctaacaagatgctggaacaccgggaagtgcgcgacaggcaccattctctgggactgaacggcggctaccaggacgaactggtggatcacagactgaccgagcgcgagtgggccgatgaatggaaacacctggatcacgccctgaactgcatcatggaaatggtggaaaagacccggcggagcatggccgtcctgagaagatgtcaagagagcgacagagaggaactgaactactggaagcggaggtacaacgagaacaccgagctgcggaaaaccggcactgagctggtgtccagacagcactctcctggctctgccgatagcctgagcaacgactcccagagagagttcaacagcagacccggcacaggctacgtgcccgtggaattttggaagaaaaccgaagaggccgtgaacaaagtcaagattcaggccatgagcgaggtgcagaaagccgtggctgaggccgaacagaaagccttcgaagtgatcgccaccgagcgggccagaatggaacagacaatcgccgacgtgaagagacaggccgccgaggatgccttcctggtcatcaacgagcaagaggaaagcaccgagaactgctggaactgcggcagaaaggccagcgagacatgcagcggctgcaatatcgccagatattgcggcagcttctgccagcacaaggactgggagagacaccacagactgtgcggccagaatctgcacggacagagccctcatggacagggcagacctctgctccctgttggcagaggatctagcgccagatctgccgactgtagcgtgccatctcctgcactggataagaccagcgccaccacaagcagaagcagcacaccagcctctgtgaccgccatcgataccaacggactgtgaggactagtccctgttcccagagcccacttttttttctttttttgaaataaaatagcctgtctttcagatctaaaaaaaaaaaaaaaaaaaaaaaaaaaaaaaaaaaaaaaaaaaaaaaaaaaaaaaaaaaaaaaaaaaaaaaaaaaaaaaaaaaaaaaaaaaaaaaaaaaa

SEQ ID NO: 1027 - RNA, 2726 nt, synthetic construct
  misc_feature 1..2726: note = Artificial____RUNX1(1-241)_I_RUNX1T1b(22-604) mRNA opt3
  source 1..2726: mol_type = other RNA
aggagagtcccgcagtcggcgtccagcggctctgcttgttcgtgtgtgtgtcgttgcaggccttattcaagcttaccatgagaatccccgtggatgccagcaccagcagaagattcacccctcctagcaccgctctgagccctggcaagatgtctgaagctctgcctctgggagcacctgatgctggtgcagctctggccggaaaactgagaagcggcgacagatccatggtggaagtgctggctgatcaccccggcgaacttgtgcggacagacagccctaatttcctgtgcagcgtgctgcctacacactggcggtgcaacaagacactgcctatcgccttcaaggtggtggctctgggagatgtgcctgatggcacactggtcacagtgatggccggcaacgacgagaattacagcgccgagctgagaaatgccaccgccgccatgaagaaccaggtggccagattcaacgacctgagattcgtgggcagaagcggcaggggcaagagctttaccctgaccatcaccgtgttcaccaatcctccacaggtggcaacctaccaccgggccatcaagatcaccgtggatggccctagagagcccagacggcacagacagaaactggacgaccagaccaagcctggcagcctgagctttagcgagagactgagcgagctggaacagctgagaagaaccgccatgcgggtgtccccacatcaccctgctcctacacctaatcctcgggccagcctgaatcacagcaccgcctttaatccccagcctcagagccagatgcagatcggccctgagaaaagggtgccagccatgcctggaagccccgtggaagtgaagatccagagcagatctagccctcctaccatgcctcctctgcctccaatcaatcctggcggccctagacctgtgtccttcacacctaccgctctgtccaacggcatcaatcacagccctccaacactgaatggcgccccatctccacctcagcggttttctaatggccctgccagcagcacaagcagcgccctgacaaatcagcagctgcctgctacatgtggcgccagacagctgagcaagctgaagcggtttctgaccacactgcagcagttcggcaacgatatcagccccgagatcggcgagaaagtgcggacactggttctggccctggtcaacagcaccgtgaccatcgaagagttccactgcaagctgcaagaggccaccaactttccgctgcggcctttcgtgatcccattcctgaaggccaacctgcctctgctgcagagagagctgctgcattgcgccagagccgccaagcagacaccttctcagtatctggcccagcacgagcatctgctgctgaacacctctatcgcctctccagccgatagcagcgagctgctcatggaagtgcacggcaacggaaagaggccctctccagagcggagagaggaaaacagcttcgaccgggacacaatcgcccctgagcctccagccaagagagtgtgcacaatcagcccagctcctagacacagccccgctctgacagtgccccttatgaaccctggcggacagtttcaccccacacctccaccactccagcactacaccctggaagatatcgccaccagccacctgtaccgcgagcctaacaagatgctggaacaccgggaagtgcgcgacaggcaccattctctgggactgaacggcggctaccaggacgaactggtggatcacagactgaccgagcgcgagtgggccgatgaatggaaacacctggatcacgccctgaactgcatcatggaaatggtggaaaagacccggcggagcatggccgtcctgagaagatgtcaagagagcgacagagaggaactgaactactggaagcggaggtacaacgagaacaccgagctgcggaaaaccggcactgagctggtgtccagacagcactctcctggctctgccgatagcctgagcaacgactcccagagagagttcaacagcagacccggcacaggctacgtgcccgtggaattttggaagaaaaccgaagaggccgtgaacaaagtcaagattcaggccatgagcgaggtgcagaaagccgtggctgaggccgaacagaaagccttcgaagtgatcgccaccgagcgggccagaatggaacagacaatcgccgacgtgaagagacaggccgccgaggatgccttcctggtcatcaacgagcaagaggaaagcaccgagaactgctggaactgcggcagaaaggccagcgagacatgcagcggctgcaatatcgccagatattgcggcagcttctgccagcacaaggactgggagagacaccacagactgtgcggccagaatctgcacggacagagccctcatggacagggcagacctctgctccctgttggcagaggatctagcgccagatctgccgactgtagcgtgccatctcctgcactggataagaccagcgccaccacaagcagaagcagcacaccagcctctgtgaccgccatcgataccaacggactgtgaggactagtccctgttcccagagcccacttttttttctttttttgaaataaaatagcctgtctttcagatctaaaaaaaaaaaaaaaaaaaaaaaaaaaaaaaaaaaaaaaaaaaaaaaaaaaaaaaaaaaaaaaaaaaaaaaaaaaaaaaaaaaaaaaaaaaaaaaaaaaa

SEQ ID NO: 1028 - RNA, 1610 nt, synthetic construct
  misc_feature 1..1610: note = Homo sapiens__Q01196-1__RUNX1(K83E_R174Q) mRNA opt3
  source 1..1610: mol_type = other RNA
aggagagtcccgcagtcggcgtccagcggctctgcttgttcgtgtgtgtgtcgttgcaggccttattcaagcttaccatgagaatccccgtggacgccagcacctccaggcggttcacacctccatctactgctctgtcaccgggcaagatgagtgaggcactcccccttggggcccctgatgcgggagctgccctggcaggtaaattgcgcagcggcgaccgatccatggtcgaagttttagccgatcacccaggggagctggtgcgtacggactctcccaactttctatgctcggtactccctacccattggagatgtaatgaaacactgccaattgctttcaaggtggtcgcacttggagatgtgcccgacggcactctggttaccgtgatggccggtaacgatgagaattactcagctgaattgaggaacgccacagcggcaatgaaaaatcaggtcgcccggtttaacgacctccgcttcgtggggagaagcggaaggggcaagagttttaccctgactataacagtattcaccaatcctccacaagttgctacgtatcaccgggccatcaaaattactgtggatggcccgcaggagccccgccgacatagacagaagctggacgatcagaccaagcctgggtccctctcttttagcgagaggttatccgaactggagcaacttcggcgtacagcaatgcgcgtctcaccacaccatcccgctcctactccaaaccccagagccagtttgaatcacagcaccgcgttcaacccgcagcctcagtctcagatgcaagacacaaggcagatccagccctccccaccttggtcatacgatcagagctatcaatacctgggaagtattgcctctccctccgtgcacccagcaacccccatcagccctggtcgggcttcgggcatgacgactctatctgccgaactctcctcacgactgagtacagctccagaccttaccgcctttagcgacccgcgccagttccccgcactgccttccatatctgatccaagaatgcattatcccggggcctttacttacagccctacaccagtgacctcaggaatcggcattggtatgagtgctatggggtccgcgacgaggtatcacacctacttgcccccgccttacccaggaagctctcaggcacaaggcggccccttccaggcctcaagtcctagctatcatctctactatggggcttccgccggatcttaccagttttcgatggtcggtggcgagcggagcccaccccgcatcctgcctccctgcacaaatgcatccactgggtcagccttactgaacccaagtctcccgaatcagtctgacgttgtggaggctgaaggaagccactccaactcacctaccaatatggcccccagcgcaagacttgaggaagcggtatggaggccatattgaggactagtccctgttcccagagcccacttttttttctttttttgaaataaaatagcctgtctttcagatctaaaaaaaaaaaaaaaaaaaaaaaaaaaaaaaaaaaaaaaaaaaaaaaaaaaaaaaaaaaaaaaaaaaaaaaaaaaaaaaaaaaaaaaaaaaaaaaaaaaa

SEQ ID NO: 1029 - RNA, 2084 nt, synthetic construct
  misc_feature 1..2084: note = Homo sapiens____CBFbeta(1-165)_SMMHC(1527-1972) mRNA opt3
  source 1..2084: mol_type = other RNA
aggagagtcccgcagtcggcgtccagcggctctgcttgttcgtgtgtgtgtcgttgcaggccttattcaagcttaccatgcccagagtggtccctgaccagaggagcaagttcgagaacgaagagtttttccggaaactgtcccgcgaatgcgagatcaagtacaccggctttcgagatcgtccacacgaagagagacaagccaggttccagaatgcttgtcgggacgggcgctctgagattgcatttgttgccacaggaactaacctctcacttcagttctttccggcgagttggcagggtgaacaaagacagacgcccagcagggagtatgtggatctggaacgggaggctggcaaagtatacttgaaggcccctatgatattaaatggggtgtgcgtcatctggaaaggatggattgacctgcagcgcctagatggcatgggttgtctcgagttcgacgaggaacgagcacagcaagaagatgccctggctcagcaggcatttgaggaagccagaaggcggacccgtgagttcgaggaccgcgatagatcccatagggaagagatggaagtgcacgagcttgaaaagtctaagcgggctctggagacacagatggaggaaatgaaaactcaattggaggaactcgaggacgaactgcaggccaccgaggatgcgaagctgcgactcgaggttaacatgcaggcattaaaagggcaatttgaacgcgacctgcaggccagagatgagcagaatgaagagaagaggcggcagcttcaacgccagttgcatgagtatgaaacagagctggaagacgagagaaaacagagggctctagccgcagctgccaagaagaaactcgaaggagacctgaaggatcttgagctgcaggcggactcggccatcaaaggccgtgaggaagcaattaagcaattgcggaaactccaggctcagatgaaggatttccagcgagagctggaagacgccagagcttcaagggatgagatctttgccaccgcaaaagaaaacgagaagaaggccaagagcttagaggctgacctgatgcaactccaggaagatcttgcggcagccgagcgcgctcggaagcaggccgacctggaaaaagaggaattggcagaggagctagccagttccctgtctggcagaaatgctctccaggatgaaaagaggcgcctggaggcccgaatagcacaacttgaagaggagctggaagaggaacaggggaacatggaggcgatgagcgaccgggtgcgtaaagctactcagcaagccgaacagttgtccaatgagctcgcaacagagagatcaaccgcccagaagaacgaaagtgctaggcagcaactggagcgccagaataaggaattacggagcaaactgcacgagatggaaggagccgtcaagtctaaattcaagtccacgatcgcagctctagaggccaaaattgcgcagctcgaggaacaggtggagcaagaagccagagagaagcaggctgcaactaagtcactgaaacagaaggataaaaagttgaaagaaatccttctgcaggtagaggacgagaggaagatggccgaacaatacaaggagcaggctgaaaaaggtaacgcccgagttaagcagctcaaacgccaactggaggaggcagaagaggaaagccagcggattaatgcgaacagaaggaaacttcagcgtgagctggacgaagccaccgagagtaatgaggctatgggccgcgaagtgaacgccttgaaatctaagctccggagagggaacgagacatccttcgtcccaagcaggcgatcgggaggccggcgcgtgatcgaaaatgcagatggttctgaggaagagactgacaccagagatgctgactttaacgggacaaaagcctccgagtgaggactagtccctgttcccagagcccacttttttttctttttttgaaataaaatagcctgtctttcagatctaaaaaaaaaaaaaaaaaaaaaaaaaaaaaaaaaaaaaaaaaaaaaaaaaaaaaaaaaaaaaaaaaaaaaaaaaaaaaaaaaaaaaaaaaaaaaaaaaaaa

SEQ ID NO: 1030 - RNA, 1799 nt, synthetic construct
  misc_feature 1..1799: note = Artificial____CBFbeta(1-165)_SMMHC(1527-1877) mRNA opt3
  source 1..1799: mol_type = other RNA
aggagagtcccgcagtcggcgtccagcggctctgcttgttcgtgtgtgtgtcgttgcaggccttattcaagcttaccatgcccagagtggtccctgaccagaggagcaagttcgagaacgaagagtttttccggaaactgtcccgcgaatgcgagatcaagtacaccggctttcgagatcgtccacacgaagagagacaagccaggttccagaatgcttgtcgggacgggcgctctgagattgcatttgttgccacaggaactaacctctcacttcagttctttccggcgagttggcagggtgaacaaagacagacgcccagcagggagtatgtggatctggaacgggaggctggcaaagtatacttgaaggcccctatgatattaaatggggtgtgcgtcatctggaaaggatggattgacctgcagcgcctagatggcatgggttgtctcgagttcgacgaggaacgagcacagcaagaagatgccctggctcagcaggcatttgaggaagccagaaggcggacccgtgagttcgaggaccgcgatagatcccatagggaagagatggaagtgcacgagcttgaaaagtctaagcgggctctggagacacagatggaggaaatgaaaactcaattggaggaactcgaggacgaactgcaggccaccgaggatgcgaagctgcgactcgaggttaacatgcaggcattaaaagggcaatttgaacgcgacctgcaggccagagatgagcagaatgaagagaagaggcggcagcttcaacgccagttgcatgagtatgaaacagagctggaagacgagagaaaacagagggctctagccgcagctgccaagaagaaactcgaaggagacctgaaggatcttgagctgcaggcggactcggccatcaaaggccgtgaggaagcaattaagcaattgcggaaactccaggctcagatgaaggatttccagcgagagctggaagacgccagagcttcaagggatgagatctttgccaccgcaaaagaaaacgagaagaaggccaaaagccttgaggctgacctgatgcaactccaggaagatcttgcggcagccgagcgcgctcggaagcaggccgacctggaaaaagaggaattggcagaggagctagccagttccctgtctggcagaaatgctctccaggatgaaaagaggcgcctggaggcccgaatagcacaacttgaagaggagctggaagaggaacaggggaacatggaggcgatgagcgaccgggtgcgtaaagctactcagcaagccgaacagttgtccaatgagctcgcaacagagagatcaaccgcccagaagaacgaaagtgctaggcagcaactggagcgccagaataaggaattacggagcaaactgcacgagatggaaggagccgtcaagtctaaattcaagtccacgatcgcagctctagaggccaaaattgcgcagctcgaggaacaggtggagcaagaagccagagagaagcaggctgcaactaagtcactgaaacagaaggataaaaagttaaaagaaatcttgctgcaggtagaggacgagaggaagatggccgaacaatacaaggagcaggctgaaaaaggtaacgcctgaggactagtccctgttcccagagcccacttttttttctttttttgaaataaaatagcctgtctttcagatctaaaaaaaaaaaaaaaaaaaaaaaaaaaaaaaaaaaaaaaaaaaaaaaaaaaaaaaaaaaaaaaaaaaaaaaaaaaaaaaaaaaaaaaaaaaaaaaaaaaa

SEQ ID NO: 1031 - RNA, 860 nt, synthetic construct
  misc_feature 1..860: note = Artificial____CBFbeta(1-165)_Linker_Lifeact mRNA opt3
  source 1..860: mol_type = other RNA
aggagagtcccgcagtcggcgtccagcggctctgcttgttcgtgtgtgtgtcgttgcaggccttattcaagcttaccatgcccagagtggtccctgaccagaggagcaagttcgagaacgaagagtttttccggaaactgtcccgcgaatgcgagatcaagtacaccggctttcgagatcgtccacacgaagagagacaagccaggttccagaatgcttgtcgggacgggcgctctgagattgcatttgttgccacaggaactaacctctcacttcagttctttccggcgagttggcagggtgaacaaagacagacgcccagcagggagtatgtggatctggaacgggaggctggcaaagtatacttgaaggcccctatgatattaaatggggtgtgcgtcatctggaaaggatggattgacctgcagcgcctagatggcatgggttgtctcgagttcgacgaggaacgagcacagcaagaagatgccctggctcagcaggcatttgaggaagccagaaggcggacccgtgagttcgaggaccgcgatagatcccatagggaagagatggaagggggatctggcggctcagggggatcgggtggcagcgggggaggcggtgtggctgaccttatcaagaagtttgagagtatttccaaagaagagggggatccacccgttgccacatgaggactagtccctgttcccagagcccacttttttttctttttttgaaataaaatagcctgtctttcagatctaaaaaaaaaaaaaaaaaaaaaaaaaaaaaaaaaaaaaaaaaaaaaaaaaaaaaaaaaaaaaaaaaaaaaaaaaaaaaaaaaaaaaaaaaaaaaaaaaaaa

SEQ ID NO: 1032 - RNA, 827 nt, synthetic construct
  misc_feature 1..827: note = Artificial____CBFbeta(1-165)_HIF1alpha(549-575) mRNA opt3
  source 1..827: mol_type = other RNA
aggagagtcccgcagtcggcgtccagcggctctgcttgttcgtgtgtgtgtcgttgcaggccttattcaagcttaccatgcccagagtggtccctgaccagaggagcaagttcgagaacgaagagtttttccggaaactgtcccgcgaatgcgagatcaagtacaccggctttcgagatcgtccacacgaagagagacaagccaggttccagaatgcttgtcgggacgggcgctctgagattgcatttgttgccacaggaactaacctctcacttcagttctttccggcgagttggcagggtgaacaaagacagacgcccagcagggagtatgtggatctggaacgggaggctggcaaagtatacttgaaggcccctatgatattaaatggggtgtgcgtcatctggaaaggatggattgacctgcagcgcctagatggcatgggttgtctcgagttcgacgaggaacgagcacagcaagaagatgccctggctcagcaggcatttgaggaagccagaaggcggacccgtgagttcgaggaccgcgatagatcccatagggaagagatggaaccattttctacacaggacactgatcttgacctggagatgttggctccctatatccctatggatgacgacttccaactccggtgaggactagtccctgttcccagagcccacttttttttctttttttgaaataaaatagcctgtctttcagatctaaaaaaaaaaaaaaaaaaaaaaaaaaaaaaaaaaaaaaaaaaaaaaaaaaaaaaaaaaaaaaaaaaaaaaaaaaaaaaaaaaaaaaaaaaaaaaaaaaaa

SEQ ID NO: 1033 - RNA, 872 nt, synthetic construct
  misc_feature 1..872: note Artificial____CBFbeta(1-165)_Linker_HIF1alpha(549-575) mRNA opt3
  source 1..872: mol_type = other RNA
aggagagtcccgcagtcggcgtccagcggctctgcttgttcgtgtgtgtgtcgttgcaggccttattcaagcttaccatgcccagagtggtccctgaccagaggagcaagttcgagaacgaagagtttttccggaaactgtcccgcgaatgcgagatcaagtacaccggctttcgagatcgtccacacgaagagagacaagccaggttccagaatgcttgtcgggacgggcgctctgagattgcatttgttgccacaggaactaacctctcacttcagttctttccggcgagttggcagggtgaacaaagacagacgcccagcagggagtatgtggatctggaacgggaggctggcaaagtatacttgaaggcccctatgatattaaatggggtgtgcgtcatctggaaaggatggattgacctgcagcgcctagatggcatgggttgtctcgagttcgacgaggaacgagcacagcaagaagatgccctggctcagcaggcatttgaggaagccagaaggcggacccgtgagttcgaggaccgcgatagatcccatagggaagagatggaagggggatctggcggctcagggggatcgggtggcagcgggggaggcccatttagtacacaggacactgatcttgacctggagatgttggctccctatatccctatggatgacgacttccaactccggtgaggactagtccctgttcccagagcccacttttttttctttttttgaaataaaatagcctgtctttcagatctaaaaaaaaaaaaaaaaaaaaaaaaaaaaaaaaaaaaaaaaaaaaaaaaaaaaaaaaaaaaaaaaaaaaaaaaaaaaaaaaaaaaaaaaaaaaaaaaaaaa

SEQ ID NO: 1034 - RNA, 2507 nt, synthetic construct
  misc_feature 1..2507: note = Artificial____RUNX1(1-177)_N_RUNX1T1a(31-604) mRNA opt3
  source 1..2507: mol_type = other RNA
aggagagtcccgcagtcggcgtccagcggctctgcttgttcgtgtgtgtgtcgttgcaggccttattcaagcttaccatgagaatccccgtggacgccagcacctccaggcggttcacacctccatctactgctctgtcaccgggcaagatgagtgaggcactcccccttggggcccctgatgcgggagctgccctggcaggtaaattgcgcagcggcgaccgatccatggtcgaagttttagccgatcacccaggggagctggtgcgtacggactctcccaactttctatgctcggtactccctacccattggagatgtaataagacactgccaattgctttcaaagtggtcgcacttggagatgtgcccgacggcactctggttaccgtgatggccggtaacgatgaaaattactcagctgagttgaggaacgccacagcggcaatgaagaatcaggtcgcccggtttaacgacctccgcttcgtggggagaagcggaaggggcaaaagttttaccctgactataacagtattcaccaatcctccacaagttgctacgtatcaccgggccatcaagattactgtggatggcccgcgcgaaccccgaaacagaaccgagaagcattccacaatgcctgactctccagtcgatgtgaaaactcagagcaggctgacaccccctaccatgccacccccgcctaccacgcagggggcaccccggacttcctcatttacaccaaccactctcacaaatggaaccagtcacagccctacggctttaaacggtgccccctctccacccaatggcttctccaacgggccttcaagcagttcttccagctcgctggcgaatcagcaacttccaccggcctgcggagcacgtcagttgtctaagctgaaacgctttctaaccacactccagcagttcggcaacgacatctcccccgagattggtgaaagagtgaggactctggtccttgggctggttaattcaaccttgacaatcgaggaatttcatagtaagctccaagaggctactaacttccctctgcggccatttgtgatacccttcttaaaagccaacctgcctctccttcagcgagagctgttgcactgtgctcgcctagccaagcagaatccagcacagtacctggcccaacacgaacagctcctgcttgatgctagcaccacatcccccgtagactctagcgagctgttgctcgacgtgaacgaaaatggaaagagaaggaccccggatcggactaaagagaacggcttcgaccgcgaacctctgcattcagagcacccaagtaagagaccctgcacgatctcccctggccagaggtatagccccaataacgggttatcttaccaaccaaatggactgcctcatcccacaccaccgcctccccagcactatcgtctagatgacatggcgattgcacaccattaccgggattcatatcgacacccaagtcatagagacctcagggatcgcaaccggcccatgggtctgcacggcaccagacaggaggaaatgatcgaccataggcttactgatcgcgagtgggccgaagagtggaaacacttggaccatctgctcaattgtattatggatatggtcgaaaagacccgacggagcctgacagtgcttcgtagatgccaggaggctgacagggaggaactgaactactggatccgccggtactccgacgccgaggatttgaaaaagggcggagggtcttcgagctcccactcaagacaacagagtcctgttaatccagaccccgtggcactcgatgcccacagggaatttctgcatcgacctgcttctggttatgtcccggaggaaatatggaaaaaggccgaggaggcagtgaacgaagtaaagcgccaggcgatgaccgagttacagaaagctgttagcgaagccgagcggaaggcacacgacatgattactacagagagagccaaaatggaaaggacggtggctgaggccaagcgtcaagcagctgaagatgccctggcggtcatcaatcagcaggaggactcctcagaaagctgttggaactgcgggcgcaaagcctctgagacctgttccggctgcaatactgctcggtactgtggaagtttctgccagcacaaggattgggagaagcatcaccatatttgcggccaaacactacaggcacagcagcaaggggacaccccagccgtgtctagctccgtcacacccaactcaggagctggtagtcctatggatactccacccgccgcaacccctagaagcacgaccccgggcacaccctcgactatcgaaaccacaccaaggtgaggactagtccctgttcccagagcccacttttttttctttttttgaaataaaatagcctgtctttcagatctaaaaaaaaaaaaaaaaaaaaaaaaaaaaaaaaaaaaaaaaaaaaaaaaaaaaaaaaaaaaaaaaaaaaaaaaaaaaaaaaaaaaaaaaaaaaaaaaaaaa

SEQ ID NO: 1035 - RNA, 1022 nt, synthetic construct
  misc_feature 1..1022: note = Artificial____RUNX1(1-241)_RUNX1T1b(short) mRNA opt3
  source 1..1022: mol_type = other RNA
aggagagtcccgcagtcggcgtccagcggctctgcttgttcgtgtgtgtgtcgttgcaggccttattcaagcttaccatgagaatccccgtggacgccagcacctccaggcggttcacacctccatctactgctctgtcaccgggcaagatgagtgaggcactcccccttggggcccctgatgcgggagctgccctggcaggtaaattgcgcagcggcgaccgatccatggtcgaagttttagccgatcacccaggggagctggtgcgtacggactctcccaactttctatgctcggtactccctacccattggagatgtaataagacactgccaattgctttcaaagtggtcgcacttggagatgtgcccgacggcactctggttaccgtgatggccggtaacgatgaaaattactcagctgagttgaggaacgccacagcggcaatgaagaatcaggtcgcccggtttaacgacctccgcttcgtggggagaagcggaaggggcaaaagttttaccctgactataacagtattcaccaatcctccacaagttgctacgtatcaccgggccatcaagattactgtggatggcccgcgcgaaccccgaagacataggcagaagctggacgatcagaccaaacctgggtccctctcttttagcgagcggttatccgagctggaacagcttcgtcgcacagcaatgagagtctcaccacaccatcccgctcctactccaaaccccagggccagtttgaatcacagcaccgcgttcaacccgcaacctcagtctcagatgcaggaggtgggattttgccacgtggcccaagtcggtctgaagctactcggctgaggactagtccctgttcccagagcccacttttttttctttttttgaaataaaatagcctgtctttcagatctaaaaaaaaaaaaaaaaaaaaaaaaaaaaaaaaaaaaaaaaaaaaaaaaaaaaaaaaaaaaaaaaaaaaaaaaaaaaaaaaaaaaaaaaaaaaaaaaaaaa

SEQ ID NO: 1036 - RNA, 2726 nt, synthetic construct
  misc_feature 1..2726: note = Artificial____RUNX1(1-241)_V_RUNX1T1b(22-604) mRNA opt3
  source 1..2726: mol_type = other RNA
aggagagtcccgcagtcggcgtccagcggctctgcttgttcgtgtgtgtgtcgttgcaggccttattcaagcttaccatgagaatccccgtggacgccagcacctccaggcggttcacacctccatctactgctctgtcaccgggcaagatgagtgaggcactcccccttggggcccctgatgcgggagctgccctggcaggtaaattgcgcagcggcgaccgatccatggtcgaagttttagccgatcacccaggggagctggtgcgtacggactctcccaactttctatgctcggtactccctacccattggagatgtaataagacactgccaattgctttcaaagtggtcgcacttggagatgtgcccgacggcactctggttaccgtgatggccggtaacgatgaaaattactcagctgagttgaggaacgccacagcggcaatgaagaatcaggtcgcccggtttaacgacctccgcttcgtggggagaagcggaaggggcaaaagttttaccctgactataacagtattcaccaatcctccacaagttgctacgtatcaccgggccatcaagattactgtggatggcccgcgcgaaccccgaagacataggcagaagctggacgatcagaccaaacctgggtccctctcttttagcgagcggttatccgagctggaacagcttcgtcgcacagcaatgagagtctcaccacaccatcccgctcctactccaaaccccagggccagtttgaatcacagcaccgcgttcaacccgcaacctcagtctcagatgcaagtgggacccgagaagcgggtgccagccatgcctggttcccccgtcgaagttaaaatccagtcacgaagcagtccacccacaatgcctccactgccgcccattaatcctggcgggccacgccccgtgtcttttacccctacggcactatccaacggaatcaatcacagcccacccactctcaacggcgctccgtcgcctccacagagattctctaatggtcccgcctcctcaacaagtagcgctctgaccaaccagcagcttcctgccacttgcggggcaaggcaactgtccaagttgaaacggtttctcacaaccctgcagcagttcggaaacgacatatctcccgagatcggcgagaaggtacgcacgttagtgctggccctcgtcaatagcaccgtgacaattgaagagtttcattgtaagctacaagaagctactaacttcccactgagacctttcgttatcccctttttgaaagcgaatctaccactgctccagagggagctgcttcactgcgcacgtgccgctaagcagaccccgtcacagtacctggcccaacatgaacacttgctcctgaacacaagtattgcatcccctgccgatagctctgagttactgatggaggtgcacggcaatgggaaacggccctcaccagaacgaagagaggaaaacagtttcgacagggacactatcgctcccgagcctccagccaagcgcgtctgtaccataagccccgcacctcggcattccccggcgctaacagtgccactcatgaatcccggaggtcagtttcaccctaccccaccccctctgcagcattatactcttgaagatattgctacgtctcacttgtacagagagccgaacaaaatgctggagcatagggaagtacgcgaccgacaccactcgctcggcctgaatgggggatatcaggatgagcttgttgaccatcggctgacagaacgtgagtgggccgatgaatggaagcacttggaccatgcactcaactgcatcatggagatggtggagaaaaccagaaggagcatggccgtcctgcgccggtgtcaagaatccgatagagaggaattaaattactggaagaggcgatataacgagaatactgagctgcgcaagaccggcacagaacttgtgtcacggcagcacagtcccggttctgctgacagcctctccaacgattcacagagagagttcaatagcaggccagggaccggctacgtccctgtggaattttggaaaaagactgaggaagccgttaacaaagtgaagattcaggcaatgtctgaggtacaaaaagctgtcgccgaggcggaacagaaggccttcgaggtgatcgctacagaacgtgcacgcatggagcagacgatcgccgacgttaagcggcaggctgccgaagatgcatttctggtgattaacgagcaagaggaatccaccgagaattgctggaactgtggaagaaaagcgagtgaaacttgcagcggctgtaatatagccaggtactgcgggtctttctgccagcacaaggactgggagcgacatcaccggctttgtggacagaacttgcatggtcaatcaccccacggccaggggcgcccactgctccctgtcggaagaggctccagtgctaggagcgccgactgctcggtgccctccccagcactggataaaacatctgctaccacaagccggtcaagtactccggcctccgtaaccgcaatcgacacgaatggtttatgaggactagtccctgttcccagagcccacttttttttctttttttgaaataaaatagcctgtctttcagatctaaaaaaaaaaaaaaaaaaaaaaaaaaaaaaaaaaaaaaaaaaaaaaaaaaaaaaaaaaaaaaaaaaaaaaaaaaaaaaaaaaaaaaaaaaaaaaaaaaaa

SEQ ID NO: 1037 - RNA, 2726 nt, synthetic construct
  misc_feature 1..2726: note = Artificial____RUNX1(1-241)_I_RUNX1T1b(22-604) mRNA opt3
  source 1..2726: mol_type = other RNA
aggagagtcccgcagtcggcgtccagcggctctgcttgttcgtgtgtgtgtcgttgcaggccttattcaagcttaccatgagaatccccgtggacgccagcacctccaggcggttcacacctccatctactgctctgtcaccgggcaagatgagtgaggcactcccccttggggcccctgatgcgggagctgccctggcaggtaaattgcgcagcggcgaccgatccatggtcgaagttttagccgatcacccaggggagctggtgcgtacggactctcccaactttctatgctcggtactccctacccattggagatgtaataagacactgccaattgctttcaaagtggtcgcacttggagatgtgcccgacggcactctggttaccgtgatggccggtaacgatgaaaattactcagctgagttgaggaacgccacagcggcaatgaagaatcaggtcgcccggtttaacgacctccgcttcgtggggagaagcggaaggggcaaaagttttaccctgactataacagtattcaccaatcctccacaagttgctacgtatcaccgggccatcaagattactgtggatggcccgcgcgaaccccgaagacataggcagaagctggacgatcagaccaaacctgggtccctctcttttagcgagcggttatccgagctggaacagcttcgtcgcacagcaatgagagtctcaccacaccatcccgctcctactccaaaccccagggccagtttgaatcacagcaccgcgttcaacccgcaacctcagtctcagatgcagatcggacccgagaagcgggtgccagccatgcctggttcccccgtggaagtcaaaattcaatcacgaagcagtccacccacaatgcctccactgccgcccatcaatcctggcgggccacgccccgtttcttttacccctacggcactatccaacggaataaatcacagcccacccactctcaacggcgctccgtcgcctccacagagattctctaatggtcccgcctcctcaacaagtagcgctctgaccaaccagcagcttcctgccacttgcggggcaaggcaactgtccaagttgaaacggtttctcacaaccctgcagcagttcggaaacgacatctctcccgagattggcgagaaggtgcgcacgttagtactggccctcgtgaatagcaccgtcacaatcgaagagtttcattgtaagctacaagaagctactaacttcccactgagacctttcgtgattccctttttgaaagcgaatctaccactgctccagagggagctgcttcactgcgcacgtgccgctaagcagaccccgtcacagtacctggcccaacatgaacacttgctcctgaacacaagtatcgcatcccctgccgatagctctgagttactgatggaggttcacggcaatgggaaacggccctcaccagaacgaagagaggaaaacagtttcgacagggacactatagctcccgagcctccagccaagcgcgtgtgtaccattagccccgcacctcggcattccccggcgctaacagtcccactcatgaatcccggaggtcagtttcaccctaccccaccccctctgcagcattatactcttgaagatatcgctacgtctcacttgtacagagagccgaacaaaatgctggagcatagggaagtgcgcgaccgacaccactcgctcggcctgaatgggggatatcaggatgagcttgtagaccatcggctgacagaacgtgagtgggccgatgaatggaagcacttggaccatgcactcaactgcattatggagatggttgagaaaaccagaaggagcatggccgtgctgcgccggtgtcaagaatccgatagagaggaattaaattactggaagaggcgatataacgagaatactgagctgcgcaagaccggcacagaacttgtctcacggcagcacagtcccggttctgctgacagcctctccaacgattcacagagagagttcaatagcaggccagggaccggctacgtgcctgtcgaattttggaaaaagactgaggaagccgtgaacaaagttaagatccaggcaatgtctgaggtgcaaaaagctgtagccgaggcggaacagaaggccttcgaggtcatcgctacagaacgtgcacgcatggagcagacgattgccgacgtgaagcggcaggctgccgaagatgcatttctggttataaacgagcaagaggaatccaccgagaattgctggaactgtggaagaaaagcgagtgaaacttgcagcggctgtaatatcgccaggtactgcgggtctttctgccagcacaaggactgggagcgacatcaccggctttgtggacagaacttgcatggtcaatcaccccacggccaggggcgcccactgctccctgtgggaagaggctccagtgctaggagcgccgactgctcggtcccctccccagcactggataaaacatctgctaccacaagccggtcaagtactccggcctccgtgaccgcaattgacacgaatggtttatgaggactagtccctgttcccagagcccacttttttttctttttttgaaataaaatagcctgtctttcagatctaaaaaaaaaaaaaaaaaaaaaaaaaaaaaaaaaaaaaaaaaaaaaaaaaaaaaaaaaaaaaaaaaaaaaaaaaaaaaaaaaaaaaaaaaaaaaaaaaaaa

SEQ ID NO: 1038 - RNA, 1610 nt, synthetic construct
  misc_feature 1..1610: note = Homo sapiens__Q01196-1__RUNX1(K83E_R174Q) mRNA opt4
  source 1..1610: mol_type = other RNA
aggagagtcccgcagtcggcgtccagcggctctgcttgttcgtgtgtgtgtcgttgcaggccttattcaagcttaccatgagaatccccgtggacgccagcaccagcagaagattcaccccccccagcaccgccctgagccccggcaagatgagcgaggccctgcccctgggcgcccccgacgccggcgccgccctggccggcaagctgagaagcggcgacagaagcatggtggaggtgctggccgaccaccccggcgagctggtgagaaccgacagccccaacttcctgtgcagcgtgctgcccacccactggagatgcaacgagaccctgcccatcgccttcaaggtggtggccctgggcgacgtgcccgacggcaccctggtgaccgtgatggccggcaacgacgagaactacagcgccgagctgagaaacgccaccgccgccatgaagaaccaggtggccagattcaacgacctgagattcgtgggcagaagcggcagaggcaagagcttcaccctgaccatcaccgtgttcaccaaccccccccaggtggccacctaccacagagccatcaagatcaccgtggacggcccccaggagcccagaagacacagacagaagctggacgaccagaccaagcccggcagcctgagcttcagcgagagactgagcgagctggagcagctgagaagaaccgccatgagagtgagcccccaccaccccgcccccacccccaaccccagagccagcctgaaccacagcaccgccttcaacccccagccccagagccagatgcaggacaccagacagatccagcccagccccccctggagctacgaccagagctaccagtacctgggcagcatcgccagccccagcgtgcaccccgccacccccatcagccccggcagagccagcggcatgaccaccctgagcgccgagctgagcagcagactgagcaccgcccccgacctgaccgccttcagcgaccccagacagttccccgccctgcccagcatcagcgaccccagaatgcactaccccggcgccttcacctacagccccacccccgtgaccagcggcatcggcatcggcatgagcgccatgggcagcgccaccagataccacacctacctgccccccccctaccccggcagcagccaggcccagggcggccccttccaggccagcagccccagctaccacctgtactacggcgccagcgccggcagctaccagttcagcatggtgggcggcgagagaagcccccccagaatcctgcccccctgcaccaacgccagcaccggcagcgccctgctgaaccccagcctgcccaaccagagcgacgtggtggaggccgagggcagccacagcaacagccccaccaacatggcccccagcgccagactggaggaggccgtgtggagaccctactgaggactagtccctgttcccagagcccacttttttttctttttttgaaataaaatagcctgtctttcagatctaaaaaaaaaaaaaaaaaaaaaaaaaaaaaaaaaaaaaaaaaaaaaaaaaaaaaaaaaaaaaaaaaaaaaaaaaaaaaaaaaaaaaaaaaaaaaaaaaaaa

SEQ ID NO: 1039 - RNA, 2084 nt, synthetic construct
  misc_feature 1..2084: note = Homo sapiens____CBFbeta(1-165)_SMMHC(1527-1972) mRNA opt4
  source 1..2084: mol_type = other RNA
aggagagtcccgcagtcggcgtccagcggctctgcttgttcgtgtgtgtgtcgttgcaggccttattcaagcttaccatgcccagagtggtgcccgaccagagaagcaagttcgagaacgaggagttcttcagaaagctgagcagagagtgcgagatcaagtacaccggcttcagagacagaccccacgaggagagacaggccagattccagaacgcctgcagagacggcagaagcgagatcgccttcgtggccaccggcaccaacctgagcctgcagttcttccccgccagctggcagggcgagcagagacagacccccagcagagagtacgtggacctggagagagaggccggcaaggtgtacctgaaggcccccatgatcctgaacggcgtgtgcgtgatctggaagggctggatcgacctgcagagactggacggcatgggctgcctggagttcgacgaggagagagcccagcaggaggacgccctggcccagcaggccttcgaggaggccagaagaagaaccagagagttcgaggacagagacagaagccacagagaggagatggaggtgcacgagctggagaagagcaagagagccctggagacccagatggaggagatgaagacccagctggaggagctggaggacgagctgcaggccaccgaggacgccaagctgagactggaggtgaacatgcaggccctgaagggccagttcgagagagacctgcaggccagagacgagcagaacgaggagaagagaagacagctgcagagacagctgcacgagtacgagaccgagctggaggacgagagaaagcagagagccctggccgccgccgccaagaagaagctggagggcgacctgaaggacctggagctgcaggccgacagcgccatcaagggcagagaggaggccatcaagcagctgagaaagctgcaggcccagatgaaggacttccagagagagctggaggacgccagagccagcagagacgagatcttcgccaccgccaaggagaacgagaagaaggccaagagcctggaggccgacctgatgcagctgcaggaggacctggccgccgccgagagagccagaaagcaggccgacctggagaaggaggagctggccgaggagctggccagcagcctgagcggcagaaacgccctgcaggacgagaagagaagactggaggccagaatcgcccagctggaggaggagctggaggaggagcagggcaacatggaggccatgagcgacagagtgagaaaggccacccagcaggccgagcagctgagcaacgagctggccaccgagagaagcaccgcccagaagaacgagagcgccagacagcagctggagagacagaacaaggagctgagaagcaagctgcacgagatggagggcgccgtgaagagcaagttcaagagcaccatcgccgccctggaggccaagatcgcccagctggaggagcaggtggagcaggaggccagagagaagcaggccgccaccaagagcctgaagcagaaggacaagaagctgaaggagatcctgctgcaggtggaggacgagagaaagatggccgagcagtacaaggagcaggccgagaagggcaacgccagagtgaagcagctgaagagacagctggaggaggccgaggaggagagccagagaatcaacgccaacagaagaaagctgcagagagagctggacgaggccaccgagagcaacgaggccatgggcagagaggtgaacgccctgaagagcaagctgagaagaggcaacgagaccagcttcgtgcccagcagaagaagcggcggcagaagagtgatcgagaacgccgacggcagcgaggaggagaccgacaccagagacgccgacttcaacggcaccaaggccagcgagtgaggactagtccctgttcccagagcccacttttttttctttttttgaaataaaatagcctgtctttcagatctaaaaaaaaaaaaaaaaaaaaaaaaaaaaaaaaaaaaaaaaaaaaaaaaaaaaaaaaaaaaaaaaaaaaaaaaaaaaaaaaaaaaaaaaaaaaaaaaaaaa

SEQ ID NO: 1040 - RNA, 1799 nt, synthetic construct
  misc_feature 1..1799: note = Artificial____CBFbeta(1-165)_SMMHC(1527-1877) mRNA opt4
  source 1..1799: mol_type = other RNA
aggagagtcccgcagtcggcgtccagcggctctgcttgttcgtgtgtgtgtcgttgcaggccttattcaagcttaccatgcccagagtggtgcccgaccagagaagcaagttcgagaacgaggagttcttcagaaagctgagcagagagtgcgagatcaagtacaccggcttcagagacagaccccacgaggagagacaggccagattccagaacgcctgcagagacggcagaagcgagatcgccttcgtggccaccggcaccaacctgagcctgcagttcttccccgccagctggcagggcgagcagagacagacccccagcagagagtacgtggacctggagagagaggccggcaaggtgtacctgaaggcccccatgatcctgaacggcgtgtgcgtgatctggaagggctggatcgacctgcagagactggacggcatgggctgcctggagttcgacgaggagagagcccagcaggaggacgccctggcccagcaggccttcgaggaggccagaagaagaaccagagagttcgaggacagagacagaagccacagagaggagatggaggtgcacgagctggagaagagcaagagagccctggagacccagatggaggagatgaagacccagctggaggagctggaggacgagctgcaggccaccgaggacgccaagctgagactggaggtgaacatgcaggccctgaagggccagttcgagagagacctgcaggccagagacgagcagaacgaggagaagagaagacagctgcagagacagctgcacgagtacgagaccgagctggaggacgagagaaagcagagagccctggccgccgccgccaagaagaagctggagggcgacctgaaggacctggagctgcaggccgacagcgccatcaagggcagagaggaggccatcaagcagctgagaaagctgcaggcccagatgaaggacttccagagagagctggaggacgccagagccagcagagacgagatcttcgccaccgccaaggagaacgagaagaaggccaagagcctggaggccgacctgatgcagctgcaggaggacctggccgccgccgagagagccagaaagcaggccgacctggagaaggaggagctggccgaggagctggccagcagcctgagcggcagaaacgccctgcaggacgagaagagaagactggaggccagaatcgcccagctggaggaggagctggaggaggagcagggcaacatggaggccatgagcgacagagtgagaaaggccacccagcaggccgagcagctgagcaacgagctggccaccgagagaagcaccgcccagaagaacgagagcgccagacagcagctggagagacagaacaaggagctgagaagcaagctgcacgagatggagggcgccgtgaagagcaagttcaagagcaccatcgccgccctggaggccaagatcgcccagctggaggagcaggtggagcaggaggccagagagaagcaggccgccaccaagagcctgaagcagaaggacaagaagctgaaggagatcctgctgcaggtggaggacgagagaaagatggccgagcagtacaaggagcaggccgagaagggcaacgcctgaggactagtccctgttcccagagcccacttttttttctttttttgaaataaaatagcctgtctttcagatctaaaaaaaaaaaaaaaaaaaaaaaaaaaaaaaaaaaaaaaaaaaaaaaaaaaaaaaaaaaaaaaaaaaaaaaaaaaaaaaaaaaaaaaaaaaaaaaaaaaa

SEQ ID NO: 1041 - RNA, 860 nt, synthetic construct
  misc_feature 1..860: note = Artificial____CBFbeta(1-165)_Linker_Lifeact mRNA opt4
  source 1..860: mol_type = other RNA
aggagagtcccgcagtcggcgtccagcggctctgcttgttcgtgtgtgtgtcgttgcaggccttattcaagcttaccatgcccagagtggtgcccgaccagagaagcaagttcgagaacgaggagttcttcagaaagctgagcagagagtgcgagatcaagtacaccggcttcagagacagaccccacgaggagagacaggccagattccagaacgcctgcagagacggcagaagcgagatcgccttcgtggccaccggcaccaacctgagcctgcagttcttccccgccagctggcagggcgagcagagacagacccccagcagagagtacgtggacctggagagagaggccggcaaggtgtacctgaaggcccccatgatcctgaacggcgtgtgcgtgatctggaagggctggatcgacctgcagagactggacggcatgggctgcctggagttcgacgaggagagagcccagcaggaggacgccctggcccagcaggccttcgaggaggccagaagaagaaccagagagttcgaggacagagacagaagccacagagaggagatggagggcggcagcggcggcagcggcggcagcggcggcagcggcggcggcggcgtggccgacctgatcaagaagttcgagagcatcagcaaggaggagggcgacccccccgtggccacctgaggactagtccctgttcccagagcccacttttttttctttttttgaaataaaatagcctgtctttcagatctaaaaaaaaaaaaaaaaaaaaaaaaaaaaaaaaaaaaaaaaaaaaaaaaaaaaaaaaaaaaaaaaaaaaaaaaaaaaaaaaaaaaaaaaaaaaaaaaaaaa

SEQ ID NO: 1042 - RNA, 827 nt, synthetic construct
  misc_feature 1..827: note = Artificial____CBFbeta(1-165)_HIF1alpha(549-575) mRNA opt4
  source 1..827: mol_type = other RNA
aggagagtcccgcagtcggcgtccagcggctctgcttgttcgtgtgtgtgtcgttgcaggccttattcaagcttaccatgcccagagtggtgcccgaccagagaagcaagttcgagaacgaggagttcttcagaaagctgagcagagagtgcgagatcaagtacaccggcttcagagacagaccccacgaggagagacaggccagattccagaacgcctgcagagacggcagaagcgagatcgccttcgtggccaccggcaccaacctgagcctgcagttcttccccgccagctggcagggcgagcagagacagacccccagcagagagtacgtggacctggagagagaggccggcaaggtgtacctgaaggcccccatgatcctgaacggcgtgtgcgtgatctggaagggctggatcgacctgcagagactggacggcatgggctgcctggagttcgacgaggagagagcccagcaggaggacgccctggcccagcaggccttcgaggaggccagaagaagaaccagagagttcgaggacagagacagaagccacagagaggagatggagcccttcagcacccaggacaccgacctggacctggagatgctggccccctacatccccatggacgacgacttccagctgagatgaggactagtccctgttcccagagcccacttttttttctttttttgaaataaaatagcctgtctttcagatctaaaaaaaaaaaaaaaaaaaaaaaaaaaaaaaaaaaaaaaaaaaaaaaaaaaaaaaaaaaaaaaaaaaaaaaaaaaaaaaaaaaaaaaaaaaaaaaaaaaa

SEQ ID NO: 1043 - RNA, 872 nt, synthetic construct
  misc_feature 1..872: note Artificial____CBFbeta(1-165)_Linker_HIF1alpha(549-575) mRNA opt4
  source 1..872: mol_type = other RNA
aggagagtcccgcagtcggcgtccagcggctctgcttgttcgtgtgtgtgtcgttgcaggccttattcaagcttaccatgcccagagtggtgcccgaccagagaagcaagttcgagaacgaggagttcttcagaaagctgagcagagagtgcgagatcaagtacaccggcttcagagacagaccccacgaggagagacaggccagattccagaacgcctgcagagacggcagaagcgagatcgccttcgtggccaccggcaccaacctgagcctgcagttcttccccgccagctggcagggcgagcagagacagacccccagcagagagtacgtggacctggagagagaggccggcaaggtgtacctgaaggcccccatgatcctgaacggcgtgtgcgtgatctggaagggctggatcgacctgcagagactggacggcatgggctgcctggagttcgacgaggagagagcccagcaggaggacgccctggcccagcaggccttcgaggaggccagaagaagaaccagagagttcgaggacagagacagaagccacagagaggagatggagggcggcagcggcggcagcggcggcagcggcggcagcggcggcggccccttcagcacccaggacaccgacctggacctggagatgctggccccctacatccccatggacgacgacttccagctgagatgaggactagtccctgttcccagagcccacttttttttctttttttgaaataaaatagcctgtctttcagatctaaaaaaaaaaaaaaaaaaaaaaaaaaaaaaaaaaaaaaaaaaaaaaaaaaaaaaaaaaaaaaaaaaaaaaaaaaaaaaaaaaaaaaaaaaaaaaaaaaaa

SEQ ID NO: 1044 - RNA, 2507 nt, synthetic construct
  misc_feature 1..2507: note = Artificial____RUNX1(1-177)_N_RUNX1T1a(31-604) mRNA opt4
  source 1..2507: mol_type = other RNA
aggagagtcccgcagtcggcgtccagcggctctgcttgttcgtgtgtgtgtcgttgcaggccttattcaagcttaccatgagaatccccgtggacgccagcaccagcagaagattcaccccccccagcaccgccctgagccccggcaagatgagcgaggccctgcccctgggcgcccccgacgccggcgccgccctggccggcaagctgagaagcggcgacagaagcatggtggaggtgctggccgaccaccccggcgagctggtgagaaccgacagccccaacttcctgtgcagcgtgctgcccacccactggagatgcaacaagaccctgcccatcgccttcaaggtggtggccctgggcgacgtgcccgacggcaccctggtgaccgtgatggccggcaacgacgagaactacagcgccgagctgagaaacgccaccgccgccatgaagaaccaggtggccagattcaacgacctgagattcgtgggcagaagcggcagaggcaagagcttcaccctgaccatcaccgtgttcaccaaccccccccaggtggccacctaccacagagccatcaagatcaccgtggacggccccagagagcccagaaacagaaccgagaagcacagcaccatgcccgacagccccgtggacgtgaagacccagagcagactgaccccccccaccatgccccccccccccaccacccagggcgcccccagaaccagcagcttcacccccaccaccctgaccaacggcaccagccacagccccaccgccctgaacggcgcccccagcccccccaacggcttcagcaacggccccagcagcagcagcagcagcagcctggccaaccagcagctgccccccgcctgcggcgccagacagctgagcaagctgaagagattcctgaccaccctgcagcagttcggcaacgacatcagccccgagatcggcgagagagtgagaaccctggtgctgggcctggtgaacagcaccctgaccatcgaggagttccacagcaagctgcaggaggccaccaacttccccctgagacccttcgtgatccccttcctgaaggccaacctgcccctgctgcagagagagctgctgcactgcgccagactggccaagcagaaccccgcccagtacctggcccagcacgagcagctgctgctggacgccagcaccaccagccccgtggacagcagcgagctgctgctggacgtgaacgagaacggcaagagaagaacccccgacagaaccaaggagaacggcttcgacagagagcccctgcacagcgagcaccccagcaagagaccctgcaccatcagccccggccagagatacagccccaacaacggcctgagctaccagcccaacggcctgccccaccccacccccccccccccccagcactacagactggacgacatggccatcgcccaccactacagagacagctacagacaccccagccacagagacctgagagacagaaacagacccatgggcctgcacggcaccagacaggaggagatgatcgaccacagactgaccgacagagagtgggccgaggagtggaagcacctggaccacctgctgaactgcatcatggacatggtggagaagaccagaagaagcctgaccgtgctgagaagatgccaggaggccgacagagaggagctgaactactggatcagaagatacagcgacgccgaggacctgaagaagggcggcggcagcagcagcagccacagcagacagcagagccccgtgaaccccgaccccgtggccctggacgcccacagagagttcctgcacagacccgccagcggctacgtgcccgaggagatctggaagaaggccgaggaggccgtgaacgaggtgaagagacaggccatgaccgagctgcagaaggccgtgagcgaggccgagagaaaggcccacgacatgatcaccaccgagagagccaagatggagagaaccgtggccgaggccaagagacaggccgccgaggacgccctggccgtgatcaaccagcaggaggacagcagcgagagctgctggaactgcggcagaaaggccagcgagacctgcagcggctgcaacaccgccagatactgcggcagcttctgccagcacaaggactgggagaagcaccaccacatctgcggccagaccctgcaggcccagcagcagggcgacacccccgccgtgagcagcagcgtgacccccaacagcggcgccggcagccccatggacaccccccccgccgccacccccagaagcaccacccccggcacccccagcaccatcgagaccacccccagatgaggactagtccctgttcccagagcccacttttttttctttttttgaaataaaatagcctgtctttcagatctaaaaaaaaaaaaaaaaaaaaaaaaaaaaaaaaaaaaaaaaaaaaaaaaaaaaaaaaaaaaaaaaaaaaaaaaaaaaaaaaaaaaaaaaaaaaaaaaaaaa

SEQ ID NO: 1045 - RNA, 1022 nt, synthetic construct
  misc_feature 1..1022: note = Artificial____RUNX1(1-241)_RUNX1T1b(short) mRNA opt4
  source 1..1022: mol_type = other RNA
aggagagtcccgcagtcggcgtccagcggctctgcttgttcgtgtgtgtgtcgttgcaggccttattcaagcttaccatgagaatccccgtggacgccagcaccagcagaagattcaccccccccagcaccgccctgagccccggcaagatgagcgaggccctgcccctgggcgcccccgacgccggcgccgccctggccggcaagctgagaagcggcgacagaagcatggtggaggtgctggccgaccaccccggcgagctggtgagaaccgacagccccaacttcctgtgcagcgtgctgcccacccactggagatgcaacaagaccctgcccatcgccttcaaggtggtggccctgggcgacgtgcccgacggcaccctggtgaccgtgatggccggcaacgacgagaactacagcgccgagctgagaaacgccaccgccgccatgaagaaccaggtggccagattcaacgacctgagattcgtgggcagaagcggcagaggcaagagcttcaccctgaccatcaccgtgttcaccaaccccccccaggtggccacctaccacagagccatcaagatcaccgtggacggccccagagagcccagaagacacagacagaagctggacgaccagaccaagcccggcagcctgagcttcagcgagagactgagcgagctggagcagctgagaagaaccgccatgagagtgagcccccaccaccccgcccccacccccaaccccagagccagcctgaaccacagcaccgccttcaacccccagccccagagccagatgcaggaggtgggcttctgccacgtggcccaggtgggcctgaagctgctgggctgaggactagtccctgttcccagagcccacttttttttctttttttgaaataaaatagcctgtctttcagatctaaaaaaaaaaaaaaaaaaaaaaaaaaaaaaaaaaaaaaaaaaaaaaaaaaaaaaaaaaaaaaaaaaaaaaaaaaaaaaaaaaaaaaaaaaaaaaaaaaaa

SEQ ID NO: 1046 - RNA, 2726 nt, synthetic construct
  misc_feature 1..2726: note = Artificial____RUNX1(1-241)_V_RUNX1T1b(22-604) mRNA opt4
  source 1..2726: mol_type = other RNA
aggagagtcccgcagtcggcgtccagcggctctgcttgttcgtgtgtgtgtcgttgcaggccttattcaagcttaccatgagaatccccgtggacgccagcaccagcagaagattcaccccccccagcaccgccctgagccccggcaagatgagcgaggccctgcccctgggcgcccccgacgccggcgccgccctggccggcaagctgagaagcggcgacagaagcatggtggaggtgctggccgaccaccccggcgagctggtgagaaccgacagccccaacttcctgtgcagcgtgctgcccacccactggagatgcaacaagaccctgcccatcgccttcaaggtggtggccctgggcgacgtgcccgacggcaccctggtgaccgtgatggccggcaacgacgagaactacagcgccgagctgagaaacgccaccgccgccatgaagaaccaggtggccagattcaacgacctgagattcgtgggcagaagcggcagaggcaagagcttcaccctgaccatcaccgtgttcaccaaccccccccaggtggccacctaccacagagccatcaagatcaccgtggacggccccagagagcccagaagacacagacagaagctggacgaccagaccaagcccggcagcctgagcttcagcgagagactgagcgagctggagcagctgagaagaaccgccatgagagtgagcccccaccaccccgcccccacccccaaccccagagccagcctgaaccacagcaccgccttcaacccccagccccagagccagatgcaggtgggccccgagaagagagtgcccgccatgcccggcagccccgtggaggtgaagatccagagcagaagcagcccccccaccatgccccccctgccccccatcaaccccggcggccccagacccgtgagcttcacccccaccgccctgagcaacggcatcaaccacagcccccccaccctgaacggcgcccccagccccccccagagattcagcaacggccccgccagcagcaccagcagcgccctgaccaaccagcagctgcccgccacctgcggcgccagacagctgagcaagctgaagagattcctgaccaccctgcagcagttcggcaacgacatcagccccgagatcggcgagaaggtgagaaccctggtgctggccctggtgaacagcaccgtgaccatcgaggagttccactgcaagctgcaggaggccaccaacttccccctgagacccttcgtgatccccttcctgaaggccaacctgcccctgctgcagagagagctgctgcactgcgccagagccgccaagcagacccccagccagtacctggcccagcacgagcacctgctgctgaacaccagcatcgccagccccgccgacagcagcgagctgctgatggaggtgcacggcaacggcaagagacccagccccgagagaagagaggagaacagcttcgacagagacaccatcgcccccgagccccccgccaagagagtgtgcaccatcagccccgcccccagacacagccccgccctgaccgtgcccctgatgaaccccggcggccagttccaccccacccccccccccctgcagcactacaccctggaggacatcgccaccagccacctgtacagagagcccaacaagatgctggagcacagagaggtgagagacagacaccacagcctgggcctgaacggcggctaccaggacgagctggtggaccacagactgaccgagagagagtgggccgacgagtggaagcacctggaccacgccctgaactgcatcatggagatggtggagaagaccagaagaagcatggccgtgctgagaagatgccaggagagcgacagagaggagctgaactactggaagagaagatacaacgagaacaccgagctgagaaagaccggcaccgagctggtgagcagacagcacagccccggcagcgccgacagcctgagcaacgacagccagagagagttcaacagcagacccggcaccggctacgtgcccgtggagttctggaagaagaccgaggaggccgtgaacaaggtgaagatccaggccatgagcgaggtgcagaaggccgtggccgaggccgagcagaaggccttcgaggtgatcgccaccgagagagccagaatggagcagaccatcgccgacgtgaagagacaggccgccgaggacgccttcctggtgatcaacgagcaggaggagagcaccgagaactgctggaactgcggcagaaaggccagcgagacctgcagcggctgcaacatcgccagatactgcggcagcttctgccagcacaaggactgggagagacaccacagactgtgcggccagaacctgcacggccagagcccccacggccagggcagacccctgctgcccgtgggcagaggcagcagcgccagaagcgccgactgcagcgtgcccagccccgccctggacaagaccagcgccaccaccagcagaagcagcacccccgccagcgtgaccgccatcgacaccaacggcctgtgaggactagtccctgttcccagagcccacttttttttctttttttgaaataaaatagcctgtctttcagatctaaaaaaaaaaaaaaaaaaaaaaaaaaaaaaaaaaaaaaaaaaaaaaaaaaaaaaaaaaaaaaaaaaaaaaaaaaaaaaaaaaaaaaaaaaaaaaaaaaaa

SEQ ID NO: 1047 - RNA, 2726 nt, synthetic construct
  misc_feature 1..2726: note = Artificial____RUNX1(1-241)_I_RUNX1T1b(22-604) mRNA opt4
  source 1..2726: mol_type = other RNA
aggagagtcccgcagtcggcgtccagcggctctgcttgttcgtgtgtgtgtcgttgcaggccttattcaagcttaccatgagaatccccgtggacgccagcaccagcagaagattcaccccccccagcaccgccctgagccccggcaagatgagcgaggccctgcccctgggcgcccccgacgccggcgccgccctggccggcaagctgagaagcggcgacagaagcatggtggaggtgctggccgaccaccccggcgagctggtgagaaccgacagccccaacttcctgtgcagcgtgctgcccacccactggagatgcaacaagaccctgcccatcgccttcaaggtggtggccctgggcgacgtgcccgacggcaccctggtgaccgtgatggccggcaacgacgagaactacagcgccgagctgagaaacgccaccgccgccatgaagaaccaggtggccagattcaacgacctgagattcgtgggcagaagcggcagaggcaagagcttcaccctgaccatcaccgtgttcaccaaccccccccaggtggccacctaccacagagccatcaagatcaccgtggacggccccagagagcccagaagacacagacagaagctggacgaccagaccaagcccggcagcctgagcttcagcgagagactgagcgagctggagcagctgagaagaaccgccatgagagtgagcccccaccaccccgcccccacccccaaccccagagccagcctgaaccacagcaccgccttcaacccccagccccagagccagatgcagatcggccccgagaagagagtgcccgccatgcccggcagccccgtggaggtgaagatccagagcagaagcagcccccccaccatgccccccctgccccccatcaaccccggcggccccagacccgtgagcttcacccccaccgccctgagcaacggcatcaaccacagcccccccaccctgaacggcgcccccagccccccccagagattcagcaacggccccgccagcagcaccagcagcgccctgaccaaccagcagctgcccgccacctgcggcgccagacagctgagcaagctgaagagattcctgaccaccctgcagcagttcggcaacgacatcagccccgagatcggcgagaaggtgagaaccctggtgctggccctggtgaacagcaccgtgaccatcgaggagttccactgcaagctgcaggaggccaccaacttccccctgagacccttcgtgatccccttcctgaaggccaacctgcccctgctgcagagagagctgctgcactgcgccagagccgccaagcagacccccagccagtacctggcccagcacgagcacctgctgctgaacaccagcatcgccagccccgccgacagcagcgagctgctgatggaggtgcacggcaacggcaagagacccagccccgagagaagagaggagaacagcttcgacagagacaccatcgcccccgagccccccgccaagagagtgtgcaccatcagccccgcccccagacacagccccgccctgaccgtgcccctgatgaaccccggcggccagttccaccccacccccccccccctgcagcactacaccctggaggacatcgccaccagccacctgtacagagagcccaacaagatgctggagcacagagaggtgagagacagacaccacagcctgggcctgaacggcggctaccaggacgagctggtggaccacagactgaccgagagagagtgggccgacgagtggaagcacctggaccacgccctgaactgcatcatggagatggtggagaagaccagaagaagcatggccgtgctgagaagatgccaggagagcgacagagaggagctgaactactggaagagaagatacaacgagaacaccgagctgagaaagaccggcaccgagctggtgagcagacagcacagccccggcagcgccgacagcctgagcaacgacagccagagagagttcaacagcagacccggcaccggctacgtgcccgtggagttctggaagaagaccgaggaggccgtgaacaaggtgaagatccaggccatgagcgaggtgcagaaggccgtggccgaggccgagcagaaggccttcgaggtgatcgccaccgagagagccagaatggagcagaccatcgccgacgtgaagagacaggccgccgaggacgccttcctggtgatcaacgagcaggaggagagcaccgagaactgctggaactgcggcagaaaggccagcgagacctgcagcggctgcaacatcgccagatactgcggcagcttctgccagcacaaggactgggagagacaccacagactgtgcggccagaacctgcacggccagagcccccacggccagggcagacccctgctgcccgtgggcagaggcagcagcgccagaagcgccgactgcagcgtgcccagccccgccctggacaagaccagcgccaccaccagcagaagcagcacccccgccagcgtgaccgccatcgacaccaacggcctgtgaggactagtccctgttcccagagcccacttttttttctttttttgaaataaaatagcctgtctttcagatctaaaaaaaaaaaaaaaaaaaaaaaaaaaaaaaaaaaaaaaaaaaaaaaaaaaaaaaaaaaaaaaaaaaaaaaaaaaaaaaaaaaaaaaaaaaaaaaaaaaa

SEQ ID NO: 1048 - RNA, 1610 nt, synthetic construct
  misc_feature 1..1610: note = Homo sapiens__Q01196-1__RUNX1(K83E_R174Q) mRNA opt5
  source 1..1610: mol_type = other RNA
aggagagtcccgcagtcggcgtccagcggctctgcttgttcgtgtgtgtgtcgttgcaggccttattcaagcttaccatgagaatccccgtggacgccagcacctcccggcgcttcacacctccgtctacggctctgagccccggcaagatgtccgaggccctccctctgggggcgcccgatgctggagccgcccttgctggcaaactgagatctggggaccggagcatggtcgaagttctcgccgatcaccctggagagctggtgcgcaccgactcccccaactttctttgctctgtgctgcctacacattggagatgtaatgaaaccctcccgattgctttcaaggtcgtggccctgggcgatgttcccgacgggacactggtgaccgtcatggcgggaaacgatgagaattacagcgccgaactccggaacgctacagccgctatgaaaaatcaggtggcccgctttaacgacctgagattcgttggccggtccggccgcggaaagagctttacccttacgatcaccgtgttcacaaatcctccccaagtcgcgacctatcacagagccattaaaatcacagtggatgggcctcaggagccccggcgccatagacagaagctggacgatcagaccaagccgggctctctctcctttagcgagcggctgtctgaacttgagcaactgcgcagaacggctatgcgggtgtcccctcaccatcccgcccctacacccaaccccagagctagcctcaatcactctaccgccttcaaccctcagccgcagtcccagatgcaagacacacgccagattcagcccagccctccctggtcctacgatcagtcttatcaatacctggggagcatcgcctcccctagcgtccaccccgctaccccgatctctcctggacgggcgtccggcatgaccacactgagcgccgaactctctagcagactgtccacggctcccgaccttaccgccttttctgaccctcgccagttccccgccctgcctagcatttccgatccccggatgcattatccgggggcttttacatacagccctacccccgttacatctggaatcggcattggcatgtccgccatggggagcgcgaccagatatcacacgtacctgccccctccgtaccccggatcttcccaggctcaaggcgggcctttccaggccagctccccctcttatcatctctactatggagccagcgctggctcctaccagttttctatggtcgggggagagcgcagccctccccggatccttcctccctgcacaaatgcctccaccggcagcgctctgctcaacccgtctctgcctaatcagtccgacgtggtggaggccgaaggcagccactctaactcccccaccaatatggcgcctagcgccagactggaggaagctgtgtggcgcccctattgaggactagtccctgttcccagagcccacttttttttctttttttgaaataaaatagcctgtctttcagatctaaaaaaaaaaaaaaaaaaaaaaaaaaaaaaaaaaaaaaaaaaaaaaaaaaaaaaaaaaaaaaaaaaaaaaaaaaaaaaaaaaaaaaaaaaaaaaaaaaaa

SEQ ID NO: 1049 - RNA, 2084 nt, synthetic construct
  misc_feature 1..2084: note = Homo sapiens____CBFbeta(1-165)_SMMHC(1527-1972) mRNA opt5
  source 1..2084: mol_type = other RNA
aggagagtcccgcagtcggcgtccagcggctctgcttgttcgtgtgtgtgtcgttgcaggccttattcaagcttaccatgcccagagtggtccctgaccagcggagcaagttcgagaacgaagagtttttccgcaaactgtccagagaatgcgagatcaagtacaccggctttcgggatcgcccgcacgaagagagacaagcccggttccagaatgcttgtcgcgacgggagatctgagattgcctttgttgcgacaggaacgaacctcagcctgcagttctttcccgcttcctggcagggcgaacaacggcagaccccttctcgcgagtatgtggatcttgaaagagaggccgggaaagtgtacctgaaggcccccatgatcctcaatggagtctgcgtgatttggaaaggctggatcgacctgcagcggcttgatgggatgggatgtctggagttcgacgaggaacgcgctcagcaagaagatgccctcgctcagcaggcctttgaggaagcgagacggcgcacaagagagttcgaggaccgggatagaagccatcgcgaagagatggaagttcacgagctggaaaagtccaagcgggccctggagacccagatggaggaaatgaaaacacaactcgaggaactggaggacgaacttcaggctaccgaggatgccaagctgagactcgaggtgaacatgcaggctctgaaaggccaatttgaacgcgaccttcaggcccgggatgagcagaatgaagagaagagacgccagctgcaacggcagctccatgagtatgaaacagagctggaagacgagagaaaacagcgcgcgctggccgctgccgctaagaagaaactcgaaggcgacctgaaggatcttgagctgcaggccgactctgccattaaagggcgggaggaagctatcaagcaactcagaaaactgcaggcgcagatgaaggatttccagcgcgagcttgaagacgcccgggctagcagagatgagatctttgccaccgccaaagaaaacgagaagaaggctaaatccctggaggccgacctcatgcaactgcaggaagatctggcggctgccgagcgggcccgcaagcaggctgacctcgaaaaagaggaactggccgaggagcttgctagctctctgtccggaagaaatgccctccaggatgaaaagcggagactggaggcgcgcattgcccaacttgaagaggagctggaagaggaacagggcaacatggaggctatgagcgaccgggtcagaaaagccacgcagcaagctgaacagctctctaatgagctggccaccgagcgctccacagcgcagaagaacgaaagcgccagacagcaactggagcggcagaataaggaactccgctctaaactgcacgagatggaaggggctgtgaagtccaaattcaagagcaccatcgccgctcttgaggccaaaattgcccagctggaggaacaggttgagcaagaagctagagagaagcaggcggccacaaagtccctcaaacagaaggataaaaagctgaaagaaatcctgcttcaggtggaggacgagcggaagatggctgaacaatacaaggagcaggccgaaaaaggaaacgcccgcgtcaagcagctcaaaagacaactggaggaggctgaagaggaatctcagcggattaatgccaaccgcagaaagctgcagcgggagctcgacgaagcgaccgagagcaatgaggctatgggccgcgaagtgaacgccctgaaatccaaacttagacgggggaacgagacgagcttcgtgccttctagacgctccggaggccggagagtcatcgaaaatgccgatggcagcgaggaagagacagacacccgcgatgctgactttaacgggacaaaggcctctgagtgaggactagtccctgttcccagagcccacttttttttctttttttgaaataaaatagcctgtctttcagatctaaaaaaaaaaaaaaaaaaaaaaaaaaaaaaaaaaaaaaaaaaaaaaaaaaaaaaaaaaaaaaaaaaaaaaaaaaaaaaaaaaaaaaaaaaaaaaaaaaaa

SEQ ID NO: 1050 - RNA, 1799 nt, synthetic construct
  misc_feature 1..1799: note = Artificial____CBFbeta(1-165)_SMMHC(1527-1877) mRNA opt5
  source 1..1799: mol_type = other RNA
aggagagtcccgcagtcggcgtccagcggctctgcttgttcgtgtgtgtgtcgttgcaggccttattcaagcttaccatgcccagagtggtccctgaccagcggagcaagttcgagaacgaagagtttttccgcaaactgtccagagaatgcgagatcaagtacaccggctttcgggatcgcccgcacgaagagagacaagcccggttccagaatgcttgtcgcgacgggagatctgagattgcctttgttgcgacaggaacgaacctcagcctgcagttctttcccgcttcctggcagggcgaacaacggcagaccccttctcgcgagtatgtggatcttgaaagagaggccgggaaagtgtacctgaaggcccccatgatcctcaatggagtctgcgtgatttggaaaggctggatcgacctgcagcggcttgatgggatgggatgtctggagttcgacgaggaacgcgctcagcaagaagatgccctcgctcagcaggcctttgaggaagcgagacggcgcacaagagagttcgaggaccgggatagaagccatcgcgaagagatggaagttcacgagctggaaaagtccaagcgggccctggagacccagatggaggaaatgaaaacacaactcgaggaactggaggacgaacttcaggctaccgaggatgccaagctgagactcgaggtgaacatgcaggctctgaaaggccaatttgaacgcgaccttcaggcccgggatgagcagaatgaagagaagagacgccagctgcaacggcagctccatgagtatgaaacagagctggaagacgagagaaaacagcgcgcgctggccgctgccgctaagaagaaactcgaaggcgacctgaaggatcttgagctgcaggccgactctgccattaaagggcgggaggaagctatcaagcaactcagaaaactgcaggcgcagatgaaggatttccagcgcgagcttgaagacgcccgggctagcagagatgagatctttgccaccgccaaagaaaacgagaagaaggctaaatccctggaggccgacctcatgcaactgcaggaagatctggcggctgccgagcgggcccgcaagcaggctgacctcgaaaaagaggaactggccgaggagcttgctagctctctgtccggaagaaatgccctccaggatgaaaagcggagactggaggcgcgcattgcccaacttgaagaggagctggaagaggaacagggcaacatggaggctatgagcgaccgggtcagaaaagccacgcagcaagctgaacagctctctaatgagctggccaccgagcgctccacagcgcagaagaacgaaagcgccagacagcaactggagcggcagaataaggaactccgctctaaactgcacgagatggaaggggctgtgaagtccaaattcaagagcaccatcgccgctcttgaggccaaaattgcccagctggaggaacaggttgagcaagaagctagagagaagcaggcggccacaaagtccctcaaacagaaggataaaaagctgaaagaaatcctgcttcaggtggaggacgagcggaagatggctgaacaatacaaggagcaggccgaaaaaggaaacgcctgaggactagtccctgttcccagagcccacttttttttctttttttgaaataaaatagcctgtctttcagatctaaaaaaaaaaaaaaaaaaaaaaaaaaaaaaaaaaaaaaaaaaaaaaaaaaaaaaaaaaaaaaaaaaaaaaaaaaaaaaaaaaaaaaaaaaaaaaaaaaaa

SEQ ID NO: 1051 - RNA, 860 nt, synthetic construct
  misc_feature 1..860: note = Artificial____CBFbeta(1-165)_Linker_Lifeact mRNA opt5
  source 1..860: mol_type = other RNA
aggagagtcccgcagtcggcgtccagcggctctgcttgttcgtgtgtgtgtcgttgcaggccttattcaagcttaccatgcccagagtggtccctgaccagcggagcaagttcgagaacgaagagtttttccgcaaactgtccagagaatgcgagatcaagtacaccggctttcgggatcgcccgcacgaagagagacaagcccggttccagaatgcttgtcgcgacgggagatctgagattgcctttgttgcgacaggaacgaacctcagcctgcagttctttcccgcttcctggcagggcgaacaacggcagaccccttctcgcgagtatgtggatcttgaaagagaggccgggaaagtgtacctgaaggcccccatgatcctcaatggagtctgcgtgatttggaaaggctggatcgacctgcagcggcttgatgggatgggatgtctggagttcgacgaggaacgcgctcagcaagaagatgccctcgctcagcaggcctttgaggaagcgagacggcgcacaagagagttcgaggaccgggatagaagccatcgcgaagagatggaaggcggctccgggggatctggcgggagcggaggctccgggggaggcggcgttgccgacctgattaagaagtttgagagcatctctaaagaagagggggatcctcccgtggctacctgaggactagtccctgttcccagagcccacttttttttctttttttgaaataaaatagcctgtctttcagatctaaaaaaaaaaaaaaaaaaaaaaaaaaaaaaaaaaaaaaaaaaaaaaaaaaaaaaaaaaaaaaaaaaaaaaaaaaaaaaaaaaaaaaaaaaaaaaaaaaaa

SEQ ID NO: 1052 - RNA, 827 nt, synthetic construct
  misc_feature 1..827: note = Artificial____CBFbeta(1-165)_HIF1alpha(549-575) mRNA opt5
  source 1..827: mol_type = other RNA
aggagagtcccgcagtcggcgtccagcggctctgcttgttcgtgtgtgtgtcgttgcaggccttattcaagcttaccatgcccagagtggtccctgaccagcggagcaagttcgagaacgaagagtttttccgcaaactgtccagagaatgcgagatcaagtacaccggctttcgggatcgcccgcacgaagagagacaagcccggttccagaatgcttgtcgcgacgggagatctgagattgcctttgttgcgacaggaacgaacctcagcctgcagttctttcccgcttcctggcagggcgaacaacggcagaccccttctcgcgagtatgtggatcttgaaagagaggccgggaaagtgtacctgaaggcccccatgatcctcaatggagtctgcgtgatttggaaaggctggatcgacctgcagcggcttgatgggatgggatgtctggagttcgacgaggaacgcgctcagcaagaagatgccctcgctcagcaggcctttgaggaagcgagacggcgcacaagagagttcgaggaccgggatagaagccatcgcgaagagatggaacctttttccacccaggacacagatctggacctggagatgctcgccccctatattcctatggatgacgacttccaactgcggtgaggactagtccctgttcccagagcccacttttttttctttttttgaaataaaatagcctgtctttcagatctaaaaaaaaaaaaaaaaaaaaaaaaaaaaaaaaaaaaaaaaaaaaaaaaaaaaaaaaaaaaaaaaaaaaaaaaaaaaaaaaaaaaaaaaaaaaaaaaaaaa

SEQ ID NO: 1053 - RNA, 872 nt, synthetic construct
  misc_feature 1..872: note Artificial____CBFbeta(1-165)_Linker_HIF1alpha(549-575) mRNA opt5
  source 1..872: mol_type = other RNA
aggagagtcccgcagtcggcgtccagcggctctgcttgttcgtgtgtgtgtcgttgcaggccttattcaagcttaccatgcccagagtggtccctgaccagcggagcaagttcgagaacgaagagtttttccgcaaactgtccagagaatgcgagatcaagtacaccggctttcgggatcgcccgcacgaagagagacaagcccggttccagaatgcttgtcgcgacgggagatctgagattgcctttgttgcgacaggaacgaacctcagcctgcagttctttcccgcttcctggcagggcgaacaacggcagaccccttctcgcgagtatgtggatcttgaaagagaggccgggaaagtgtacctgaaggcccccatgatcctcaatggagtctgcgtgatttggaaaggctggatcgacctgcagcggcttgatgggatgggatgtctggagttcgacgaggaacgcgctcagcaagaagatgccctcgctcagcaggcctttgaggaagcgagacggcgcacaagagagttcgaggaccgggatagaagccatcgcgaagagatggaaggcggctccgggggatctggcgggagcggaggctccgggggaggcccttttagcacccaggacacagatctggacctggagatgctcgccccctatattcctatggatgacgacttccaactgcggtgaggactagtccctgttcccagagcccacttttttttctttttttgaaataaaatagcctgtctttcagatctaaaaaaaaaaaaaaaaaaaaaaaaaaaaaaaaaaaaaaaaaaaaaaaaaaaaaaaaaaaaaaaaaaaaaaaaaaaaaaaaaaaaaaaaaaaaaaaaaaaa

SEQ ID NO: 1054 - RNA, 2507 nt, synthetic construct
  misc_feature 1..2507: note = Artificial____RUNX1(1-177)_N_RUNX1T1a(31-604) mRNA opt5
  source 1..2507: mol_type = other RNA
aggagagtcccgcagtcggcgtccagcggctctgcttgttcgtgtgtgtgtcgttgcaggccttattcaagcttaccatgagaatccccgtggacgccagcacctcccggcgcttcacacctccgtctacggctctgagccccggcaagatgtccgaggccctccctctgggggcgcccgatgctggagccgcccttgctggcaaactgagatctggggaccggagcatggtcgaagttctcgccgatcaccctggagagctggtgcgcaccgactcccccaactttctttgctctgtgctgcctacacattggagatgtaataagaccctcccgattgctttcaaagtcgtggccctgggcgatgttcccgacgggacactggtgaccgtcatggcgggaaacgatgaaaattacagcgccgagctccggaacgctacagccgctatgaagaatcaggtggcccgctttaacgacctgagattcgttggccggtccggccgcgggaaatcttttacccttacgatcaccgtgttcacaaatcctccccaagtcgcgacctatcacagagccattaagatcacagtggatggacctcgggaaccccgcaacagaaccgagaagcattctacgatgccggactcccctgtggatgtcaaaacacagagccggctgacaccccctaccatgccccctcccccgaccacccagggcgctccccgcacatcttcctttacgcctaccacactcaccaatgggacaagccactctcccaccgccctgaacggagctccttccccgcccaatggcttcagcaacgggccttcctctagctccagcagctcccttgccaatcagcaactgccccctgcctgcggagctagacagctcagcaagctgaaacggtttctgacgacactccagcagttcggcaacgacatttctcccgagatcggcgaaagagttcgcaccctggtgcttgggctggtgaatagcaccctcacaatcgaggaatttcattccaagctgcaagaggcgaccaacttccctcttcggccctttgtcattccgttcctgaaagccaacctccctctgctgcagagagagctcctgcactgtgctcgccttgccaagcagaatcccgcccagtacctggctcaacacgaacagctcctgcttgatgcctctacaacgagccccgtggactccagcgagctgctcctggacgttaacgaaaatggaaagcggagaacccctgatcgcacaaaagagaacggcttcgaccgggaaccgctgcattctgagcacccctccaagagaccttgcaccatcagccccgggcagcgctattctcctaataacggactctcctaccaacccaatggcctgcctcatcccacaccgcctccccctcagcactatcggcttgatgacatggcgattgctcaccattacagagatagctatcgccacccctcccatcgggacctgagagatcggaaccgcccgatggggctccacggaaccagacaggaggaaatgatcgaccatcggctgacggatagagagtgggccgaagagtggaaacacctggaccaccttctcaattgtattatggatatggtggaaaagacccgccggtctctgacagtcctgagacgctgccaggaggccgacagagaggaactcaactactggatccggcgctacagcgacgctgaggatctgaaaaagggcggcgggtcctctagctcccatagcagacaacagtctcctgtgaatcccgaccctgttgcccttgatgctcaccgggaatttctgcatcgccccgcctccggatatgtgcccgaggaaatttggaaaaaggcggaggaggccgtcaacgaagtgaagagacaggctatgaccgagctccagaaagccgtcagcgaagctgagcggaaggcccacgacatgatcacaaccgagcgcgcgaaaatggaaagaacggtggccgaggctaagcggcaagccgctgaagatgccctggccgttatcaatcagcaggaggactcttccgaaagctgttggaactgcggccgcaaagctagcgagacatgtagcgggtgcaataccgcgagatactgtggatccttctgccagcacaaggattgggagaagcatcaccatatttgcggccaaacactgcaggcccagcagcaaggggacacccctgctgtgtcttcttccgtcaccccgaacagcggcgccggatcccccatggatacacctcccgccgctacgcctcggtctaccacacccggcacccctagcacaatcgaaaccacgccgagatgaggactagtccctgttcccagagcccacttttttttctttttttgaaataaaatagcctgtctttcagatctaaaaaaaaaaaaaaaaaaaaaaaaaaaaaaaaaaaaaaaaaaaaaaaaaaaaaaaaaaaaaaaaaaaaaaaaaaaaaaaaaaaaaaaaaaaaaaaaaaaa

SEQ ID NO: 1055 - RNA, 1022 nt, synthetic construct
  misc_feature 1..1022: note = Artificial____RUNX1(1-241)_RUNX1T1b(short) mRNA opt5
  source 1..1022: mol_type = other RNA
aggagagtcccgcagtcggcgtccagcggctctgcttgttcgtgtgtgtgtcgttgcaggccttattcaagcttaccatgagaatccccgtggacgccagcacctcccggcgcttcacacctccgtctacggctctgagccccggcaagatgtccgaggccctccctctgggggcgcccgatgctggagccgcccttgctggcaaactgagatctggggaccggagcatggtcgaagttctcgccgatcaccctggagagctggtgcgcaccgactcccccaactttctttgctctgtgctgcctacacattggagatgtaataagaccctcccgattgctttcaaagtcgtggccctgggcgatgttcccgacgggacactggtgaccgtcatggcgggaaacgatgaaaattacagcgccgagctccggaacgctacagccgctatgaagaatcaggtggcccgctttaacgacctgagattcgttggccggtccggccgcgggaaatcttttacccttacgatcaccgtgttcacaaatcctccccaagtcgcgacctatcacagagccattaagatcacagtggatggacctcgggaaccccgcagacatcggcagaagctggacgatcagaccaaaccgggcagcctctcctttagcgagcgcctgtctgagcttgaacagctgagacggacggctatgagagtgtcccctcaccatcccgcccctacacccaacccccgcgctagcctcaatcactctaccgccttcaaccctcaaccgcagtcccagatgcaggaggtcgggttttgccacgttgcccaagtgggactgaagctgctcggctgaggactagtccctgttcccagagcccacttttttttctttttttgaaataaaatagcctgtctttcagatctaaaaaaaaaaaaaaaaaaaaaaaaaaaaaaaaaaaaaaaaaaaaaaaaaaaaaaaaaaaaaaaaaaaaaaaaaaaaaaaaaaaaaaaaaaaaaaaaaaaa

SEQ ID NO: 1056 - RNA, 2726 nt, synthetic construct
  misc_feature 1..2726: note = Artificial____RUNX1(1-241)_V_RUNX1T1b(22-604) mRNA opt5
  source 1..2726: mol_type = other RNA
aggagagtcccgcagtcggcgtccagcggctctgcttgttcgtgtgtgtgtcgttgcaggccttattcaagcttaccatgagaatccccgtggacgccagcacctcccggcgcttcacacctccgtctacggctctgagccccggcaagatgtccgaggccctccctctgggggcgcccgatgctggagccgcccttgctggcaaactgagatctggggaccggagcatggtcgaagttctcgccgatcaccctggagagctggtgcgcaccgactcccccaactttctttgctctgtgctgcctacacattggagatgtaataagaccctcccgattgctttcaaagtcgtggccctgggcgatgttcccgacgggacactggtgaccgtcatggcgggaaacgatgaaaattacagcgccgagctccggaacgctacagccgctatgaagaatcaggtggcccgctttaacgacctgagattcgttggccggtccggccgcgggaaatcttttacccttacgatcaccgtgttcacaaatcctccccaagtcgcgacctatcacagagccattaagatcacagtggatggacctcgggaaccccgcagacatcggcagaagctggacgatcagaccaaaccgggcagcctctcctttagcgagcgcctgtctgagcttgaacagctgagacggacggctatgagagtgtcccctcaccatcccgcccctacacccaacccccgcgctagcctcaatcactctaccgccttcaaccctcaaccgcagtcccagatgcaggtcgggcccgagaagcgggttcctgccatgcccggaagccctgtggaagtgaaaattcaatccagatctagccctccgacaatgcctcccctgcctcccatcaatcctggcgggccccgcccggtctcctttacccctaccgctctgagcaacggaatcaatcactctcctcccacactcaacggcgcgccctccccgccccagcggttcagcaatggccctgcctctagcacgtcctctgctctgaccaaccagcagcttcccgccacatgcggggccagacaactgagcaagctcaaacgctttctgaccacacttcagcagttcggaaacgacatttcccctgagatcggcgagaaggtgcggaccctggttctcgctctggtgaatagcacggtcacaattgaagagtttcattgtaagctgcaagaagccaccaacttccccctcagacctttcgtgatcccctttctgaaagcgaatcttccgctgctccagcgcgagctgcttcactgcgctcgggccgccaagcagaccccttctcagtacctggctcaacatgaacacctcctgctgaacacatccattgccagccccgctgattcttccgagctcctgatggaggttcacgggaatggaaaaagacctagccccgaacgccgggaggaaaactccttcgacagagacaccatcgccccggagcctcccgcgaagcgggtgtgtacaatttctcctgctccccgccatagccccgcccttacggtccctctgatgaatccgggcgggcagtttcaccccacccctccccctctccagcattatacactggaagatatcgccacctcccacctgtacagagagcccaacaaaatgcttgagcatcgggaagtgagagaccgccaccactctctcggactgaatggcggctatcaggatgagctggtcgaccatcggctcacagaaagagagtgggctgatgaatggaagcacctggaccatgcccttaactgcatcatggagatggtggagaaaacccgcagaagcatggcggttctgcggcgctgtcaagaatccgatagagaggaactcaattactggaagcggcgctataacgagaatacggagctgagaaagaccgggacagaactggtgagccggcagcactctcctggatccgccgacagcctttctaacgattcccagcgcgagttcaatagcagaccgggcaccgggtacgtccccgtggaattttggaaaaagacagaggaagctgttaacaaagtgaagattcaggccatgtctgaggtccaaaaagctgtggccgaggccgaacagaaggctttcgaggtgatcgcgaccgaacgggcccgcatggagcagacgattgctgacgttaagagacaggccgccgaagatgcttttctcgtcatcaacgagcaagaggaaagcacagagaattgctggaactgtggacggaaagcctccgaaacctgcagcggctgtaatattgcgagatactgcgggtctttctgccagcacaaggactgggagcgccatcaccggctgtgtggccagaacctgcatggacaatcccctcacggccaggggagacccctcctgcctgtgggacgcggcagctccgctcggtctgccgactgcagcgtgccctccccggcccttgataaaacatctgctaccaccagcagatcctctacacccgccagcgtcacggcgatcgacaccaatgggctgtgaggactagtccctgttcccagagcccacttttttttctttttttgaaataaaatagcctgtctttcagatctaaaaaaaaaaaaaaaaaaaaaaaaaaaaaaaaaaaaaaaaaaaaaaaaaaaaaaaaaaaaaaaaaaaaaaaaaaaaaaaaaaaaaaaaaaaaaaaaaaaa

SEQ ID NO: 1057 - RNA, 2726 nt, synthetic construct
  misc_feature 1..2726: note = Artificial____RUNX1(1-241)_I_RUNX1T1b(22-604) mRNA opt5
  source 1..2726: mol_type = other RNA
aggagagtcccgcagtcggcgtccagcggctctgcttgttcgtgtgtgtgtcgttgcaggccttattcaagcttaccatgagaatccccgtggacgccagcacctcccggcgcttcacacctccgtctacggctctgagccccggcaagatgtccgaggccctccctctgggggcgcccgatgctggagccgcccttgctggcaaactgagatctggggaccggagcatggtcgaagttctcgccgatcaccctggagagctggtgcgcaccgactcccccaactttctttgctctgtgctgcctacacattggagatgtaataagaccctcccgattgctttcaaagtcgtggccctgggcgatgttcccgacgggacactggtgaccgtcatggcgggaaacgatgaaaattacagcgccgagctccggaacgctacagccgctatgaagaatcaggtggcccgctttaacgacctgagattcgttggccggtccggccgcgggaaatcttttacccttacgatcaccgtgttcacaaatcctccccaagtcgcgacctatcacagagccattaagatcacagtggatggacctcgggaaccccgcagacatcggcagaagctggacgatcagaccaaaccgggcagcctctcctttagcgagcgcctgtctgagcttgaacagctgagacggacggctatgagagtgtcccctcaccatcccgcccctacacccaacccccgcgctagcctcaatcactctaccgccttcaaccctcaaccgcagtcccagatgcagattgggcccgagaagcgggtccctgccatgcccggaagccctgttgaagtgaaaatccaatccagatctagccctccgacaatgcctcccctgcctcccatcaatcctggcgggccccgcccggtgtcctttacccctaccgctctgagcaacggaattaatcactctcctcccacactcaacggcgcgccctccccgccccagcggttcagcaatggccctgcctctagcacgtcctctgctctgaccaaccagcagcttcccgccacatgcggggccagacaactgagcaagctcaaacgctttctgaccacacttcagcagttcggaaacgacatctcccctgagattggcgagaaggtccggaccctggtgctcgctctggttaatagcacggtgacaatcgaagagtttcattgtaagctgcaagaagccaccaacttccccctcagacctttcgtcattccctttctgaaagcgaatcttccgctgctccagcgcgagctgcttcactgcgctcgggccgccaagcagaccccttctcagtacctggctcaacatgaacacctcctgctgaacacatccatcgccagccccgctgattcttccgagctcctgatggaggtgcacgggaatggaaaaagacctagccccgaacgccgggaggaaaactccttcgacagagacaccattgccccggagcctcccgcgaagcgggtttgtacaatctctcctgctccccgccatagccccgcccttacggtgcctctgatgaatccgggcgggcagtttcaccccacccctccccctctccagcattatacactggaagatatcgccacctcccacctgtacagagagcccaacaaaatgcttgagcatcgggaagtcagagaccgccaccactctctcggactgaatggcggctatcaggatgagctggtggaccatcggctcacagaaagagagtgggctgatgaatggaagcacctggaccatgcccttaactgcattatggagatggtcgagaaaacccgcagaagcatggcggtgctgcggcgctgtcaagaatccgatagagaggaactcaattactggaagcggcgctataacgagaatacggagctgagaaagaccgggacagaactggttagccggcagcactctcctggatccgccgacagcctttctaacgattcccagcgcgagttcaatagcagaccgggcaccgggtacgtgcccgtcgaattttggaaaaagacagaggaagctgtgaacaaagttaagatccaggccatgtctgaggtgcaaaaagctgtcgccgaggccgaacagaaggctttcgaggtgattgcgaccgaacgggcccgcatggagcagacgatcgctgacgtgaagagacaggccgccgaagatgcttttctcgttattaacgagcaagaggaaagcacagagaattgctggaactgtggacggaaagcctccgaaacctgcagcggctgtaatatcgcgagatactgcgggtctttctgccagcacaaggactgggagcgccatcaccggctgtgtggccagaacctgcatggacaatcccctcacggccaggggagacccctcctgcctgtcggacgcggcagctccgctcggtctgccgactgcagcgtgccctccccggcccttgataaaacatctgctaccaccagcagatcctctacacccgccagcgtgacggcgatcgacaccaatgggctgtgaggactagtccctgttcccagagcccacttttttttctttttttgaaataaaatagcctgtctttcagatctaaaaaaaaaaaaaaaaaaaaaaaaaaaaaaaaaaaaaaaaaaaaaaaaaaaaaaaaaaaaaaaaaaaaaaaaaaaaaaaaaaaaaaaaaaaaaaaaaaaa

SEQ ID NO: 1058 - RNA, 1610 nt, synthetic construct
  misc_feature 1..1610: note = Homo sapiens__Q01196-1__RUNX1(K83E_R174Q) mRNA opt11
  source 1..1610: mol_type = other RNA
aggagagtcccgcagtcggcgtccagcggctctgcttgttcgtgtgtgtgtcgttgcaggccttattcaagcttaccatgcgcatcccagtagacgcctcaacctcacgtcgcttcacccctccctcaacagccctctcacccggcaaaatgtccgaagcattacccctcggtgcccccgacgcaggcgcagcactcgccggcaaacttcgatctggcgaccgatccatggtcgaagtcctagccgaccaccccggcgaactcgtacgaacagactcacccaatttcctctgctccgtcctccccactcactggcgctgcaacgaaaccctgcccattgccttcaaagtcgtcgcacttggcgacgtcccagacggcaccctagtaacagtaatggccggaaacgacgaaaactactcagcagaactacgcaacgccaccgccgccatgaaaaaccaagtagcccgcttcaacgatctacgattcgtcggccgatccggacgtggcaaatccttcactcttacaatcacagtcttcacaaatcccccacaagtcgccacctaccaccgcgccatcaaaattaccgttgacggcccccaagaaccaagacgccatcgtcaaaaacttgacgaccaaaccaaacccggctcactatcattctccgaacgcctctccgaactcgaacaactccgccgcaccgccatgcgcgtctcaccccaccaccccgctcccacaccaaaccccagggcctcccttaaccactccaccgcattcaacccccaaccacaatcccaaatgcaagacacacgacaaatacaaccatccccaccgtggtcatacgaccaatcttaccaatacctcggttctatagcctccccatccgtccacccagccacacccatctcccccggccgcgcatccggaatgaccacactctcagccgaactctcctcccgcctatcaaccgcccctgacctcaccgccttttccgacccccgacaattccccgcactaccgtcaatctccgacccccgaatgcactatcccggcgccttcacctactcccccacacctgtaacctccggcatcggcatcggcatgtccgccatgggaagcgccaccagatatcatacttacctacccccaccttatccaggatcctcacaagcccaaggcggcccttttcaagcctcctccccctcctaccatctctactacggcgcctccgccggctcctaccaattctccatggtcggcggcgaacgatcaccaccccgaatcctccctccctgcaccaacgcatcgaccggatcggccctcttaaacccctccctccccaaccaatcagacgtcgtcgaagccgaaggatctcactccaactcccccacaaacatggcaccttcagcccgcctcgaagaagccgtctggcgcccctactaaggactagtccctgttcccagagcccacttttttttctttttttgaaataaaatagcctgtctttcagatctaaaaaaaaaaaaaaaaaaaaaaaaaaaaaaaaaaaaaaaaaaaaaaaaaaaaaaaaaaaaaaaaaaaaaaaaaaaaaaaaaaaaaaaaaaaaaaaaaaaa

SEQ ID NO: 1059 - RNA, 2084 nt, synthetic construct
  misc_feature 1..2084: note = Homo sapiens____CBFbeta(1-165)_SMMHC(1527-1972) mRNA opt11
  source 1..2084: mol_type = other RNA
aggagagtcccgcagtcggcgtccagcggctctgcttgttcgtgtgtgtgtcgttgcaggccttattcaagcttaccatgccaagggtggtgcccgaccagagaagcaagttcgaaaatgaggaatttttccggaagctgagcagggaatgcgagataaaatacacgggcttccgagacagaccacacgaagagaggcaagcgaggttccaaaacgcctgcagagacggaagaagcgagatagcgttcgtggccacggggacgaacctgagcctacagttcttccctgcaagctggcaaggagaacagaggcagacaccgagtagggagtacgtggacctggagagggaggcggggaaggtgtacctgaaggcaccaatgatactaaatggagtatgtgtaatctggaagggatggatagacctgcaacggctggacgggatgggatgcctggagttcgacgaggaaagagcgcagcaagaggacgcgctggcacaacaggcgttcgaggaagcaaggaggcggacgcgagagttcgaggacagggataggagccacagagaggagatggaggtacacgagctagagaaaagcaagagggcgctggaaacacaaatggaggagatgaagacacagctggaggagttggaagacgaactgcaagcgacagaggacgcaaagctgaggctggaagtcaacatgcaggcattaaagggacagttcgagagagacctgcaggcaagagacgagcagaacgaggaaaagaggaggcagctccaaaggcagctgcacgagtacgaaacggaactggaggacgagcgaaagcagagggcgctagcagcagcagcaaagaaaaagctggagggggacctgaaggacctggagttgcaggcagacagcgcaataaaagggagggaagaggcgatcaagcaactaagaaagctgcaggcacaaatgaaggatttccagagagagctagaggatgcaagggcaagccgggacgagatattcgcgacggcaaaagaaaacgagaaaaaggcgaaaagcctagaagcagacctgatgcagctacaggaggatttggcggcggcggagagggcaaggaaacaggcagatctggagaaggaggagctggcggaagagttggcaagtagcctaagcggaaggaatgcgctgcaggacgaaaagcggagactcgaggcgagaatagcacagctagaggaggaactggaggaggagcagggaaacatggaagcgatgagcgacagagtgagaaaggcgacgcaacaggcggaacagctaagcaacgagttagcaacggagagaagtacagcccaaaagaatgaaagtgcaaggcaacagctagagaggcagaacaaggaactgaggagcaagctgcacgagatggaaggagcagtgaaaagcaaattcaaaagcaccatcgcggcgctggaagcgaagatagcgcagctggaggagcaggtagaacaagaggcaagagagaagcaagcggcgacaaagagtctaaagcagaaagacaagaaactgaaagagatactgttacaagtggaggacgaaaggaagatggcagagcaatacaaggagcaggcggaaaaggggaacgcgagggtgaaacagttaaagaggcaactggaggaggcggaggaagagagccaaagaataaacgccaacagaaggaaactacagcgggaattggacgaggcaacagagagtaacgaagccatggggcgagaagtgaacgcactaaagagcaaactgaggcgggggaacgagacgagtttcgtaccgagcaggcggagcggagggagaagggtgatagagaatgcagacggcagcgaagaggaaacggacacgagagacgcagacttcaacgggacgaaggcgagcgaatagggactagtccctgttcccagagcccacttttttttctttttttgaaataaaatagcctgtctttcagatctaaaaaaaaaaaaaaaaaaaaaaaaaaaaaaaaaaaaaaaaaaaaaaaaaaaaaaaaaaaaaaaaaaaaaaaaaaaaaaaaaaaaaaaaaaaaaaaaaaaa

SEQ ID NO: 1060 - RNA, 1799 nt, synthetic construct
  misc_feature 1..1799: note = Artificial____CBFbeta(1-165)_SMMHC(1527-1877) mRNA opt11
  source 1..1799: mol_type = other RNA
aggagagtcccgcagtcggcgtccagcggctctgcttgttcgtgtgtgtgtcgttgcaggccttattcaagcttaccatgccgagggtggtgccagaccaaaggagcaagttcgagaacgaggaatttttcagaaagctgagcagagagtgcgagataaagtacacggggtttagagacagaccacacgaggagaggcaggcaaggttccagaacgcatgcagagacgggagaagcgagatagcattcgtagcgacaggaacaaacctaagcctacaatttttcccggcgagctggcagggagagcagagacagacgccaagcagggagtacgtggacctagagagggaagcaggaaaggtgtacctaaaggcaccaatgatactaaatggggtgtgcgtaatatggaaggggtggatagacctacagagactggacgggatgggatgcttggagttcgacgaagagagagcgcaacaggaggacgcactggcacaacaagcattcgaagaggcaaggaggaggacgagagagttcgaggacagagacaggagtcacagggaggaaatggaggtacacgaactagagaaaagcaagagggcgctggagacacagatggaagagatgaaaacgcaactggaggagctggaagacgagctgcaggcaacagaagatgcgaagctaaggctggaggtgaacatgcaggcactgaaaggacagttcgaaagggacctgcaggcgagggacgaacagaacgaggaaaagaggaggcagctccagaggcagctacacgagtacgagacggagttggaagacgagagaaagcaaagagcactagcggcggcggcgaagaaaaagctagagggagacctcaaagatctggagctacaggcagacagcgcgataaagggcagggaggaagcgataaagcagctaaggaagctgcaggcacagatgaaggacttccagagggagctcgaggacgcaagagcgagccgggacgagatattcgccacggcaaaggagaacgaaaagaaggcgaaaagcctggaggcggacctaatgcaactgcaagaagacctggcagcggcagagcgagcgaggaagcaggcagacctagagaaggaggagctggcggaagaactggcgagtagcctgagcggaaggaacgcactgcaggacgagaagaggaggctagaggcaagaatagcgcagctggaggaggagttggaggaggagcaggggaacatggaggcgatgagcgacagagtgagaaaggcgacacagcaagcagagcagttaagcaacgagctggcaacagagagaagcacggcgcaaaagaacgaatcagcgaggcaacagttggagaggcagaacaaggaactaagaagcaagctgcacgagatggagggcgcggtaaagagcaaattcaagtcaacaatagcggcgcttgaggcaaagatagcacagctggaagaacaagtagaacaggaggcgagagagaaacaagcagcgacaaagagcctgaaacagaaggacaagaagttaaaggagatactgctacaggtagaggacgaaagaaaaatggcggaacagtacaaagagcaggcagaaaaggggaacgcataaggactagtccctgttcccagagcccacttttttttctttttttgaaataaaatagcctgtctttcagatctaaaaaaaaaaaaaaaaaaaaaaaaaaaaaaaaaaaaaaaaaaaaaaaaaaaaaaaaaaaaaaaaaaaaaaaaaaaaaaaaaaaaaaaaaaaaaaaaaaaa

SEQ ID NO: 1061 - RNA, 860 nt, synthetic construct
  misc_feature 1..860: note = Artificial____CBFbeta(1-165)_Linker_Lifeact mRNA opt11
  source 1..860: mol_type = other RNA
aggagagtcccgcagtcggcgtccagcggctctgcttgttcgtgtgtgtgtcgttgcaggccttattcaagcttaccatgccgcgcgtggtcccggaccagcgctcgaaatttgaaaatgaagagttctttcgcaagctctcgcgagagtgcgagataaagtacacgggctttcgcgatagaccgcacgaggaaaggcaagcgcgctttcaaaatgcctgtagagatggcaggagcgagatcgcgttcgtggccacgggcacgaacttgagcctgcaatttttcccggcctcgtggcagggcgagcagaggcaaacgccctcgcgcgagtacgtggacttggaaagggaagcgggcaaggtgtatctaaaggccccgatgatactaaatggagtgtgcgtgatctggaaagggtggatagacctgcaaaggctcgatggaatgggctgtctagagttcgatgaggaacgcgcgcaacaggaagacgcattggcacagcaagcgttcgaggaagcacgcaggagaacgcgcgagttcgaggacagggacaggagccatcgcgaggaaatggaagggggctcgggagggagcgggggctctggcgggagcgggggaggaggcgtggccgatctcatcaaaaagttcgagagcataagcaaagaagagggcgatcccccggtagcgacatagggactagtccctgttcccagagcccacttttttttctttttttgaaataaaatagcctgtctttcagatctaaaaaaaaaaaaaaaaaaaaaaaaaaaaaaaaaaaaaaaaaaaaaaaaaaaaaaaaaaaaaaaaaaaaaaaaaaaaaaaaaaaaaaaaaaaaaaaaaaaa

SEQ ID NO: 1062 - RNA, 827 nt, synthetic construct
  misc_feature 1..827: note = Artificial____CBFbeta(1-165)_HIF1alpha(549-575) mRNA opt11
  source 1..827: mol_type = other RNA
aggagagtcccgcagtcggcgtccagcggctctgcttgttcgtgtgtgtgtcgttgcaggccttattcaagcttaccatgccgcgcgtggtcccggaccagcgctcgaaatttgaaaatgaagagttctttcgaaagctctcgcgcgagtgcgagatcaaatacacgggcttccgcgatcgcccgcacgaggaaaggcaagcgcgctttcaaaatgcctgtcgcgatggcaggagcgagatcgcgttcgtggccacgggcacgaacctgagcctgcaatttttcccggcctcgtggcagggcgagcaaaggcaaacgccctcgcgcgagtacgtggacttggaaagggaagcgggcaaggtctatctcaaggccccgatgatactcaatggcgtgtgcgtgatctggaaagggtggatagacttgcaaaggctcgatggcatgggctgtctcgagttcgacgaggaacgcgcgcaacaggaagatgccctggcccagcaagcgttcgaggaagcgcgcaggcgcacgcgcgagttcgaggacagagacaggagccaccgagaggaaatggaaccgttctcgacccaggacacggacctggacttggaaatgctcgcgccctatatcccgatggatgacgatttccagctcaggtaaggactagtccctgttcccagagcccacttttttttctttttttgaaataaaatagcctgtctttcagatctaaaaaaaaaaaaaaaaaaaaaaaaaaaaaaaaaaaaaaaaaaaaaaaaaaaaaaaaaaaaaaaaaaaaaaaaaaaaaaaaaaaaaaaaaaaaaaaaaaaa

SEQ ID NO: 1063 - RNA, 872 nt, synthetic construct
  misc_feature 1..872: note Artificial____CBFbeta(1-165)_Linker_HIF1alpha(549-575) mRNA opt11
  source 1..872: mol_type = other RNA
aggagagtcccgcagtcggcgtccagcggctctgcttgttcgtgtgtgtgtcgttgcaggccttattcaagcttaccatgccgcgcgtggtcccggaccagcgctcgaaatttgaaaatgaagagttctttcgaaagctatcgcgagagtgcgagatcaagtacacgggattccgcgatcgaccgcacgaggaaagacaagcgcgatttcaaaatgcatgtcgcgatggcaggagcgagatagcgttcgtggccacgggcacaaacttgagcttgcaattcttcccggcatcatggcagggcgagcaaaggcaaacaccctcgcgcgagtacgtggacttggaaagggaagcgggcaaggtctacctaaaggccccgatgatactcaatggagtgtgcgtgatctggaaagggtggatagacttacaaaggctcgatggcatgggatgtctcgagttcgatgaggaacgcgcgcaacaggaagatgccttggcacagcaagcgttcgaggaagcgcgcaggcgaacgcgcgagttcgaagacagagacaggagccatcgagaggaaatggaaggaggatcgggcggaagcgggggctcgggcgggagcgggggcggaccatttagcacgcaagataccgatctagatctcgagatgttggccccgtacatacccatggacgatgactttcaattgcgctagggactagtccctgttcccagagcccacttttttttctttttttgaaataaaatagcctgtctttcagatctaaaaaaaaaaaaaaaaaaaaaaaaaaaaaaaaaaaaaaaaaaaaaaaaaaaaaaaaaaaaaaaaaaaaaaaaaaaaaaaaaaaaaaaaaaaaaaaaaaaa

SEQ ID NO: 1064 - RNA, 2507 nt, synthetic construct
  misc_feature 1..2507: note = Artificial____RUNX1(1-177)_N_RUNX1T1a(31-604) mRNA opt11
  source 1..2507: mol_type = other RNA
aggagagtcccgcagtcggcgtccagcggctctgcttgttcgtgtgtgtgtcgttgcaggccttattcaagcttaccatgcgcataccagtagatgcctccacctctcgccgcttcacacctccctcgacagccctcagccccggaaaaatgtccgaagcgctcccacttggcgcacccgacgcaggcgctgccctcgccggaaaactccgtagtggtgaccgctctatggtggaagtcttagccgaccaccccggagaactcgtaagaacagactccccaaacttcctctgctccgtgctacctacacactggcgctgcaacaaaaccctcccgattgccttcaaagtcgtagccctaggcgacgtccccgacggaaccctcgtcaccgtcatggcaggcaatgatgaaaactactccgcagaactccgcaacgccaccgctgcaatgaaaaaccaagtcgcacgattcaatgacctcagattcgtagggcgctccggccgagggaaatcattcaccctcacaatcacagtcttcaccaaccctccacaagtcgcaacataccaccgcgccatcaaaatcacagtcgacggaccccgagaaccccgcaatagaactgagaaacacagcaccatgcccgattcgccagtcgatgtcaaaacccaatcaaggctcaccccgcccacaatgcccccacccccaaccacacagggcgcaccccgcacctcttcattcacccctacaacactaacaaatggcacatcccacagtccaaccgcccttaatggcgccccatccccaccaaacggtttctccaacggcccctcctcttcatcatcatcctccctggctaaccaacaactcccacccgcatgcggagcacgacaactcagcaaactaaaacgattcctcaccactcttcaacaattcggcaacgacatatccccagaaataggcgaacgagtccgaaccctagtcctcggtctagtcaattccacgctcactatagaggagttccactccaaactacaagaagctaccaacttcccactccgaccattcgtcattccattcctcaaggcaaacctccctctgctccaacgtgaactcctacactgcgccagactcgccaagcaaaaccccgcacaatatcttgcccaacacgaacaacttctcttagacgcctccaccacatctcccgtcgactcatctgaacttctcctagatgttaacgaaaacggcaaacgcagaactcccgaccgcaccaaagaaaacgggttcgatagagaaccactacacagcgaacacccctctaaacgcccatgcaccatatctcctggccaacggtactcacctaacaacggtctctcataccaacccaatggcctcccacaccccaccccaccacccccacaacactaccgacttgacgacatggcgatcgcacaccactacagagactcttataggcacccatcccaccgcgatctccgcgaccgcaatcgccccatgggactacacggcactcgccaagaagaaatgatcgaccaccgactaaccgaccgtgaatgggcagaagaatggaaacacctcgaccacctcctaaattgcatcatggacatggtcgagaaaacaaggcgctcactcacggttctccgtcgctgccaagaagcagatcgtgaagaactgaactattggattcgacgatactcagacgccgaagacctcaagaaaggcggaggctcatctagctcccatagtcgccaacaatcacccgtaaacccggacccagtagccctcgacgctcaccgagagttcctacaccgtcccgcctccggatacgtacccgaagaaatatggaagaaagctgaagaagcagtaaacgaagtcaaacgccaagctatgaccgaactacaaaaagccgtaagcgaagctgaacgcaaagcacacgacatgatcactaccgaacgcgcaaaaatggaacgaaccgtcgcagaagccaaacgccaggccgccgaagacgcccttgctgtcataaatcagcaagaagactcctccgaatcctgctggaactgtggccgcaaagccagcgaaacctgctccggttgcaataccgcccgctactgcggttcattctgccagcacaaagactgggaaaaacaccaccacatctgcggtcaaaccctgcaagctcaacaacaaggcgacacccctgccgtctcatccagcgtaacccccaacagcggcgccggctccccaatggacaccccacccgcagccacaccccgatcaacaacacccggaacaccctcgactatcgaaaccacaccccgttagggactagtccctgttcccagagcccacttttttttctttttttgaaataaaatagcctgtctttcagatctaaaaaaaaaaaaaaaaaaaaaaaaaaaaaaaaaaaaaaaaaaaaaaaaaaaaaaaaaaaaaaaaaaaaaaaaaaaaaaaaaaaaaaaaaaaaaaaaaaaa

SEQ ID NO: 1065 - RNA, 1022 nt, synthetic construct
  misc_feature 1..1022: note = Artificial____RUNX1(1-241)_RUNX1T1b(short) mRNA opt11
  source 1..1022: mol_type = other RNA
aggagagtcccgcagtcggcgtccagcggctctgcttgttcgtgtgtgtgtcgttgcaggccttattcaagcttaccatgcgcatcccagtcgacgcctccacctcccgccgcttcaccccaccctcaacagcactctcacccggcaaaatgtcagaagcactccctctcggagcacccgacgccggcgccgccctcgccggcaaactccgctcaggcgaccgatcaatggtcgaagtcctagccgaccaccccggagaactcgtccgcaccgactcacccaacttcctctgctccgtcctacccacccactggcgctgcaacaaaaccctccccatcgccttcaaagtcgtcgcactaggcgacgtcccagacggcaccctcgtcaccgtcatggccggcaacgacgaaaactactccgccgaactccgcaacgccacagcagccatgaaaaaccaagtcgcccgcttcaacgacctccgcttcgtaggccgctccggccgcggcaaatccttcaccctaaccatcacagtattcaccaatccaccccaagtcgccacctaccaccgcgctatcaaaatcaccgtcgacggcccccgcgaaccccgccgccaccgacaaaaactcgacgaccaaaccaaacccggctcactctccttctccgaacgcctctccgaactcgaacaactccgccgaacagccatgcgcgtctcaccccaccaccccgcccccacccccaacccccgagcctccctcaaccactcaaccgccttcaacccccaaccacaatcccaaatgcaagaagtcggcttctgccacgtagcccaagtcggtctcaaactcctcggctaaggactagtccctgttcccagagcccacttttttttctttttttgaaataaaatagcctgtctttcagatctaaaaaaaaaaaaaaaaaaaaaaaaaaaaaaaaaaaaaaaaaaaaaaaaaaaaaaaaaaaaaaaaaaaaaaaaaaaaaaaaaaaaaaaaaaaaaaaaaaaa

SEQ ID NO: 1066 - RNA, 2726 nt, synthetic construct
  misc_feature 1..2726: note = Artificial____RUNX1(1-241)_V_RUNX1T1b(22-604) mRNA opt11
  source 1..2726: mol_type = other RNA
aggagagtcccgcagtcggcgtccagcggctctgcttgttcgtgtgtgtgtcgttgcaggccttattcaagcttaccatgcgcatccccgtggacgcctcaacaagccgacgcttcacgcccccatccaccgccctatcccccggcaaaatgtcagaagccctccccctcggagccccagacgcaggggccgcactcgcaggcaaacttcgatccggggacaggagcatggtcgaagtcctagccgaccaccccggagagctagtccgaaccgactcccccaacttcctgtgctccgtactgccaacccactggcgatgtaacaaaacactccctatagcttttaaagtagtggccctaggagacgttccagacggcaccctcgtcaccgtcatggccggcaacgacgaaaactacagcgccgaactacgcaacgcaactgccgccatgaaaaatcaagtggccagattcaacgacctccgcttcgtcggccgcagcggaagaggaaaatcgttcaccttaaccatcacagttttcacaaacccaccccaggttgcaacatatcaccgagccatcaaaatcactgttgacggcccacgtgaaccaagacggcatcgtcaaaaactagacgaccaaacaaaaccaggttcactctcattttcagaacgcctctcagaactcgaacaactacgacgaaccgctatgcgcgtctcaccccaccaccccgccccgaccccgaacccacgagcatctctgaaccacagcacagccttcaacccacaaccacagtcccaaatgcaagttggacccgagaaacgagtcccagctatgccgggcagccccgtcgaggtcaaaatccaatcgcgcagcagccctcccacaatgcccccactaccacccatcaacccaggcggtccccgccccgtctcattcaccccaacagccctctcaaatggaatcaaccacagccctcccaccctcaacggtgccccctccccaccacaacgcttttcaaacggaccagcgtcctccacctccagcgctctcactaaccaacaactcccagcaacttgcggagccagacaactcagcaaactaaaaagattcctcaccaccctacaacagttcggaaacgacatctcccccgaaataggcgagaaagttcgcactcttgtactagcccttgtaaactccacagtaactatcgaagagttccactgcaaactacaagaagcaaccaacttcccactccgccccttcgtgatcccattcctaaaagcaaacctaccactactccaacgcgaactgctccactgcgcccgtgccgcaaaacagactccctcacaatacctcgcccaacatgaacatcttctcctcaacacatcaattgctagcccagcagactcatccgaacttctcatggaagtccacggaaacggtaaacgaccatctcccgaacgacgcgaagaaaactccttcgaccgcgacaccatcgcccccgaaccacccgccaaacgcgtatgcacaatatcaccggccccgcgccactcccctgcacttaccgtaccccttatgaacccagggggccaattccaccctacacccccacccctgcagcactacactctagaagacattgcaacaagccacctataccgagaacctaacaaaatgctagaacacagagaagtgcgtgaccgccaccacagcctcggcttaaacgggggctaccaagacgaactcgttgatcaccgcctcaccgaacgagagtgggcagatgaatggaaacacctggaccacgccctaaactgcatcatggaaatggtcgagaaaaccagacgatcaatggccgtcctaagaaggtgccaagaatcagacagagaagaactcaactattggaaacgacgatataacgaaaacaccgaactcagaaaaacaggcactgaactcgtctcgagacaacactcaccaggctctgcagactctctttccaacgactcacaacgcgagttcaatagccgaccaggcaccggctacgtccccgtcgaattttggaagaaaaccgaagaagccgtaaacaaagtcaaaatacaagcaatgtccgaagtccaaaaagccgtcgccgaagcagaacaaaaagccttcgaggttatcgcgaccgaacgcgcccgtatggaacagacaatagccgacgtcaaacgacaggctgccgaagacgctttcctcgttatcaacgaacaagaagaatcaactgaaaactgctggaactgcggccggaaagcgtccgaaacctgctcaggctgcaacatcgctcgttattgcggctccttttgccaacataaagactgggagcgccaccaccgcctatgcggccaaaacctacacggccaaagcccccacggacaaggccgacctctcctacccgtaggccgaggctcctccgcacgctccgccgactgcagcgtccccagccccgcactcgacaaaacttcggcaaccacatcccgcagcagcacccccgcgagcgttacagccatcgacacaaacggactataaggactagtccctgttcccagagcccacttttttttctttttttgaaataaaatagcctgtctttcagatctaaaaaaaaaaaaaaaaaaaaaaaaaaaaaaaaaaaaaaaaaaaaaaaaaaaaaaaaaaaaaaaaaaaaaaaaaaaaaaaaaaaaaaaaaaaaaaaaaaaa

SEQ ID NO: 1067 - RNA, 2726 nt, synthetic construct
  misc_feature 1..2726: note = Artificial____RUNX1(1-241)_I_RUNX1T1b(22-604) mRNA opt11
  source 1..2726: mol_type = other RNA
aggagagtcccgcagtcggcgtccagcggctctgcttgttcgtgtgtgtgtcgttgcaggccttattcaagcttaccatgaggatacccgtcgacgcctccacgtcacgccgcttcacacccccaagcaccgccctatcacccggcaaaatgtccgaagctctaccactaggtgcgccagacgcaggcgctgctctcgccggaaaactacgatccggggaccgatccatggtcgaagtcctcgctgatcaccccggcgaacttgtccgcacagactccccaaacttcctctgctccgtactcccgactcactggcgttgcaacaaaacacttcctattgcgttcaaggtcgtagccctaggggacgtccccgacggcaccttagtcacagtcatggcgggtaacgacgagaactactcagccgaattacgcaacgctacagcagccatgaaaaaccaggtagctcgcttcaacgacctccggttcgtcggtagaagcggccgaggaaaatcttttaccctcacaatcaccgtgttcaccaacccaccccaagtcgccacctaccaccgggcaatcaaaatcacagttgacggaccccgcgagccccgacgccatcgccaaaaacttgacgaccaaaccaaaccaggatcactatccttctcagagcgactctcagaactcgaacaattacgccggaccgcaatgcgtgtctcaccccaccacccggcccccacgcccaacccccgcgcctcactcaaccactccactgctttcaacccgcaaccccaatcccaaatgcagatcggcccagaaaaacgcgttcccgccatgccaggaagtcccgtcgaagtcaaaatccaatccagatcttccccaccaaccatgcctcccctcccgcccataaacccgggaggtccccgacccgtgtccttcacccccaccgccctctcgaacggcatcaaccactcaccacctaccctaaacggagcaccatccccaccccaacgcttctcaaacggacctgcatcctccacatcgtccgccctcaccaaccaacaactcccagccacatgcggcgcccgtcaactatctaagctaaaacgcttcctaaccactctccagcaatttggcaacgacatatcccccgaaatcggcgaaaaagtccgcacactcgtcttagccctcgtcaattccaccgtcaccatagaagagttccactgcaaactccaagaagccacaaacttcccactccgtccctttgtcatcccattcttaaaggcgaacctaccactactccaaagagaactactccactgcgctcgggccgcaaaacaaacccctagccagtacctagcccaacacgaacatctactactcaacactagcatcgcctcacccgcagactcatctgaactacttatggaagtccacggcaacggcaaacgcccctccccagaaaggcgcgaagaaaactccttcgatcgagacacaatagcacccgaaccacccgccaaacgcgtatgcaccatcagcccagcaccccgacactccccagccctcacggtccctctaatgaacccgggcggacaattccaccccaccccaccacccctacaacactacacattagaagacatagccacatctcacctctaccgcgaacccaataaaatgctggaacaccgcgaagtccgagatagacaccattctctaggactaaatggaggctaccaagacgaacttgtcgaccacagactcacagaacgcgaatgggccgacgaatggaagcacctcgatcatgcccttaactgtatcatggagatggtagagaaaacaagacgatccatggcagttctacgtcgatgccaagagagcgaccgcgaagaactcaactactggaaacgccgctacaacgaaaacacagaactacgaaaaaccggcaccgaactcgtctcccgtcagcactccccgggaagcgccgactcccttagcaacgactcacaacgcgagttcaactctcgccccggaacaggctacgttcctgtcgagttctggaagaaaactgaagaagccgtaaacaaagtcaaaatccaagccatgtcagaagtccaaaaagccgtagcagaagccgaacaaaaggctttcgaagtaattgcaaccgaacgcgcacgtatggaacaaaccatagcagatgtaaaaagacaagccgccgaagacgccttcctcgtcataaacgaacaagaagaatccaccgaaaactgttggaactgcggccgtaaagcctccgaaacatgttctggctgcaacattgcccgttactgtgggtccttctgccaacacaaagattgggaacgccaccaccgcctctgcggacaaaacctccacggccaaagcccccatggtcaaggtagaccactactacccgttggacgcggctccagcgcacgatcagccgactgctcagtgccatcccccgcccttgacaaaacctccgccacaacctcgcgatcatccacaccagcctcagtaacagccatagacaccaacgggctttgaggactagtccctgttcccagagcccacttttttttctttttttgaaataaaatagcctgtctttcagatctaaaaaaaaaaaaaaaaaaaaaaaaaaaaaaaaaaaaaaaaaaaaaaaaaaaaaaaaaaaaaaaaaaaaaaaaaaaaaaaaaaaaaaaaaaaaaaaaaaaa

SEQ ID NO: 1068 - RNA, 1616 nt, synthetic construct
  misc_feature 1..1616: note = Homo sapiens__Q01196-1__RUNX1(K83E_R174Q) mRNA wt
  source 1..1616: mol_type = other RNA
aggagagtcccgcagtcggcgtccagcggctctgcttgttcgtgtgtgtgtcgttgcaggccttattcaagcttaccatgcgtatccccgtagatgccagcacgagccgccgcttcacgccgccttccaccgcgctgagcccaggcaagatgagcgaggcgttgccgctgggcgccccggacgccggcgctgccctggccggcaagctgaggagcggcgaccgcagcatggtggaggtgctggccgaccacccgggcgagctggtgcgcaccgacagccccaacttcctctgctccgtgctgcctacgcactggcgctgcaacgagaccctgcccatcgctttcaaggtggtggccctaggggatgttccagatggcactctggtcactgtgatggctggcaatgatgaaaactactcggctgagctgagaaatgctaccgcagccatgaagaaccaggttgcaagatttaatgacctcaggtttgtcggtcgaagtggaagagggaaaagcttcactctgaccatcactgtcttcacaaacccaccgcaagtcgccacctaccacagagccatcaaaatcacagtggatgggccccaggaacctcgaagacatcggcagaaactagatgatcagaccaagcccgggagcttgtccttttccgagcggctcagtgaactggagcagctgcggcgcacagccatgagggtcagcccacaccacccagcccccacgcccaaccctcgtgcctccctgaaccactccactgcctttaaccctcagcctcagagtcagatgcaggatacaaggcagatccaaccatccccaccgtggtcctacgatcagtcctaccaatacctgggatccattgcctctccttctgtgcacccagcaacgcccatttcacctggacgtgccagcggcatgacaaccctctctgcagaactttccagtcgactctcaacggcacccgacctgacagcgttcagcgacccgcgccagttccccgcgctgccctccatctccgacccccgcatgcactatccaggcgccttcacctactccccgacgccggtcacctcgggcatcggcatcggcatgtcggccatgggctcggccacgcgctaccacacctacctgccgccgccctaccccggctcgtcgcaagcgcagggaggcccgttccaagccagctcgccctcctaccacctgtactacggcgcctcggccggctcctaccagttctccatggtgggcggcgagcgctcgccgccgcgcatcctgccgccctgcaccaacgcctccaccggctccgcgctgctcaaccccagcctcccgaaccagagcgacgtggtggaggccgagggcagccacagcaactcccccaccaacatggcgccctccgcgcgcctggaggaggccgtgtggaggccctactgatgatgaggactagtccctgttcccagagcccacttttttttctttttttgaaataaaatagcctgtctttcagatctaaaaaaaaaaaaaaaaaaaaaaaaaaaaaaaaaaaaaaaaaaaaaaaaaaaaaaaaaaaaaaaaaaaaaaaaaaaaaaaaaaaaaaaaaaaaaaaaaaaa

SEQ ID NO: 1069 - RNA, 2090 nt, synthetic construct
  misc_feature 1..2090: note = Homo sapiens____CBFbeta(1-165)_SMMHC(1527-1972) mRNA wt
  source 1..2090: mol_type = other RNA
aggagagtcccgcagtcggcgtccagcggctctgcttgttcgtgtgtgtgtcgttgcaggccttattcaagcttaccatgccgcgcgtcgtgcccgaccagagaagcaagttcgagaacgaggagttttttaggaagctgagccgcgagtgtgagattaagtacacgggcttcagggaccggccccacgaggaacgccaggcacgcttccagaacgcctgccgcgacggccgctcggaaatcgcttttgtggccacaggaaccaatctgtctctccagttttttccggccagctggcagggagaacagcgacaaacacctagccgagagtatgtcgacttagaaagagaagcaggcaaggtatatttgaaggctcccatgattctgaatggagtctgtgttatctggaaaggctggattgatctccaaagactggatggtatgggctgtctggagtttgatgaggagcgagcccagcaggaggatgcattagcacaacaggcctttgaagaggctcggagaaggacacgcgaatttgaagatagagacaggtctcatcgggaggaaatggaggtccatgagctggagaagtccaagcgggccctggagacccagatggaggagatgaagacgcagctggaagagctggaggacgagctgcaagccacggaggacgccaaactgcggctggaagtcaacatgcaggcgctcaagggccagttcgaaagggatctccaagcccgggacgagcagaatgaggagaagaggaggcaactgcagagacagcttcacgagtatgagacggaactggaagacgagcgaaagcaacgtgccctggcagctgcagcaaagaagaagctggaaggggacctgaaagacctggagcttcaggccgactctgccatcaaggggagggaggaagccatcaagcagctacgcaaactgcaggctcagatgaaggactttcaaagagagctggaagatgcccgtgcctccagagatgagatctttgccacagccaaagagaatgagaagaaagccaagagcttggaagcagacctcatgcagctacaagaggacctcgccgccgctgagagggctcgcaaacaagcggacctcgagaaggaggaactggcagaggagctggccagtagcctgtcgggaaggaacgcactccaggacgagaagcgccgcctggaggcccggatcgcccagctggaggaggagctggaggaggagcagggcaacatggaggccatgagcgaccgggtccgcaaagccacacagcaggccgagcagctcagcaacgagctggccacagagcgcagcacggcccagaagaatgagagtgcccggcagcagctcgagcggcagaacaaggagctccggagcaagctccacgagatggagggggccgtcaagtccaagttcaagtccaccatcgcggcgctggaggccaagattgcacagctggaggagcaggtcgagcaggaggccagagagaaacaggcggccaccaagtcgctgaagcagaaagacaagaagctgaaggaaatcttgctgcaggtggaggacgagcgcaagatggccgagcagtacaaggagcaggcagagaaaggcaatgccagggtcaagcagctcaagaggcagctggaggaggcagaggaggagtcccagcgcatcaacgccaaccgcaggaagctgcagcgggagctggatgaggccacggagagcaacgaggccatgggccgcgaggtgaacgcactcaagagcaagctcaggcgaggaaacgagacctctttcgttccttctagaaggtctggaggacgtagagttattgaaaatgcagatggttctgaggaggaaacggacactcgagacgcagacttcaatggaaccaaggccagtgaatgatgatgaggactagtccctgttcccagagcccacttttttttctttttttgaaataaaatagcctgtctttcagatctaaaaaaaaaaaaaaaaaaaaaaaaaaaaaaaaaaaaaaaaaaaaaaaaaaaaaaaaaaaaaaaaaaaaaaaaaaaaaaaaaaaaaaaaaaaaaaaaaaaa

SEQ ID NO: 1070 - RNA, 1805 nt, synthetic construct
  misc_feature 1..1805: note = Artificial____CBFbeta(1-165)_SMMHC(1527-1877) mRNA wt
  source 1..1805: mol_type = other RNA
aggagagtcccgcagtcggcgtccagcggctctgcttgttcgtgtgtgtgtcgttgcaggccttattcaagcttaccatgccgcgcgtcgtgcccgaccagagaagcaagttcgagaacgaggagttttttaggaagctgagccgcgagtgtgagattaagtacacgggcttcagggaccggccccacgaggaacgccaggcacgcttccagaacgcctgccgcgacggccgctcggaaatcgcttttgtggccacaggaaccaatctgtctctccagttttttccggccagctggcagggagaacagcgacaaacacctagccgagagtatgtcgacttagaaagagaagcaggcaaggtatatttgaaggctcccatgattctgaatggagtctgtgttatctggaaaggctggattgatctccaaagactggatggtatgggctgtctggagtttgatgaggagcgagcccagcaggaggatgcattagcacaacaggcctttgaagaggctcggagaaggacacgcgaatttgaagatagagacaggtctcatcgggaggaaatggaggtccatgagctggagaagtccaagcgggccctggagacccagatggaggagatgaagacgcagctggaagagctggaggacgagctgcaagccacggaggacgccaaactgcggctggaagtcaacatgcaggcgctcaagggccagttcgaaagggatctccaagcccgggacgagcagaatgaggagaagaggaggcaactgcagagacagcttcacgagtatgagacggaactggaagacgagcgaaagcaacgtgccctggcagctgcagcaaagaagaagctggaaggggacctgaaagacctggagcttcaggccgactctgccatcaaggggagggaggaagccatcaagcagctacgcaaactgcaggctcagatgaaggactttcaaagagagctggaagatgcccgtgcctccagagatgagatctttgccacagccaaagagaatgagaagaaagccaagagcttggaagcagacctcatgcagctacaagaggacctcgccgccgctgagagggctcgcaaacaagcggacctcgagaaggaggaactggcagaggagctggccagtagcctgtcgggaaggaacgcactccaggacgagaagcgccgcctggaggcccggatcgcccagctggaggaggagctggaggaggagcagggcaacatggaggccatgagcgaccgggtccgcaaagccacacagcaggccgagcagctcagcaacgagctggccacagagcgcagcacggcccagaagaatgagagtgcccggcagcagctcgagcggcagaacaaggagctccggagcaagctccacgagatggagggggccgtcaagtccaagttcaagtccaccatcgcggcgctggaggccaagattgcacagctggaggagcaggtcgagcaggaggccagagagaaacaggcggccaccaagtcgctgaagcagaaagacaagaagctgaaggaaatcttgctgcaggtggaggacgagcgcaagatggccgagcagtacaaggagcaggcagagaaaggcaatgcctgatgatgaggactagtccctgttcccagagcccacttttttttctttttttgaaataaaatagcctgtctttcagatctaaaaaaaaaaaaaaaaaaaaaaaaaaaaaaaaaaaaaaaaaaaaaaaaaaaaaaaaaaaaaaaaaaaaaaaaaaaaaaaaaaaaaaaaaaaaaaaaaaaa

SEQ ID NO: 1071 - RNA, 866 nt, synthetic construct
  misc_feature 1..866: note = Artificial____CBFbeta(1-165)_Linker_Lifeact mRNA wt
  source 1..866: mol_type = other RNA
aggagagtcccgcagtcggcgtccagcggctctgcttgttcgtgtgtgtgtcgttgcaggccttattcaagcttaccatgccgcgcgtcgtgcccgaccagagaagcaagttcgagaacgaggagttttttaggaagctgagccgcgagtgtgagattaagtacacgggcttcagggaccggccccacgaggaacgccaggcacgcttccagaacgcctgccgcgacggccgctcggaaatcgcttttgtggccacaggaaccaatctgtctctccagttttttccggccagctggcagggagaacagcgacaaacacctagccgagagtatgtcgacttagaaagagaagcaggcaaggtatatttgaaggctcccatgattctgaatggagtctgtgttatctggaaaggctggattgatctccaaagactggatggtatgggctgtctggagtttgatgaggagcgagcccagcaggaggatgcattagcacaacaggcctttgaagaggctcggagaaggacacgcgaatttgaagatagagacaggtctcatcgggaggaaatggagggcgggagcggcgggtccggcgggagcggcggctccgggggcgggggcgtggccgacctgatcaagaagttcgagagcatcagcaaggaggagggggatccaccggtcgccacctgatgatgaggactagtccctgttcccagagcccacttttttttctttttttgaaataaaatagcctgtctttcagatctaaaaaaaaaaaaaaaaaaaaaaaaaaaaaaaaaaaaaaaaaaaaaaaaaaaaaaaaaaaaaaaaaaaaaaaaaaaaaaaaaaaaaaaaaaaaaaaaaaaa

SEQ ID NO: 1072 - RNA, 833 nt, synthetic construct
  misc_feature 1..833: note = Artificial____CBFbeta(1-165)_HIF1alpha(549-575) mRNA wt
  source 1..833: mol_type = other RNA
aggagagtcccgcagtcggcgtccagcggctctgcttgttcgtgtgtgtgtcgttgcaggccttattcaagcttaccatgccgcgcgtcgtgcccgaccagagaagcaagttcgagaacgaggagttttttaggaagctgagccgcgagtgtgagattaagtacacgggcttcagggaccggccccacgaggaacgccaggcacgcttccagaacgcctgccgcgacggccgctcggaaatcgcttttgtggccacaggaaccaatctgtctctccagttttttccggccagctggcagggagaacagcgacaaacacctagccgagagtatgtcgacttagaaagagaagcaggcaaggtatatttgaaggctcccatgattctgaatggagtctgtgttatctggaaaggctggattgatctccaaagactggatggtatgggctgtctggagtttgatgaggagcgagcccagcaggaggatgcattagcacaacaggcctttgaagaggctcggagaaggacacgcgaatttgaagatagagacaggtctcatcgggaggaaatggagccattttctactcaggacacagatttagacttggagatgttagctccctatatcccaatggatgatgacttccagttacgttgatgatgaggactagtccctgttcccagagcccacttttttttctttttttgaaataaaatagcctgtctttcagatctaaaaaaaaaaaaaaaaaaaaaaaaaaaaaaaaaaaaaaaaaaaaaaaaaaaaaaaaaaaaaaaaaaaaaaaaaaaaaaaaaaaaaaaaaaaaaaaaaaaa

SEQ ID NO: 1073 - RNA, 878 nt, synthetic construct
  misc_feature 1..878: note Artificial____CBFbeta(1-165)_Linker_HIF1alpha(549-575) mRNA wt
  source 1..878: mol_type = other RNA
aggagagtcccgcagtcggcgtccagcggctctgcttgttcgtgtgtgtgtcgttgcaggccttattcaagcttaccatgccgcgcgtcgtgcccgaccagagaagcaagttcgagaacgaggagttttttaggaagctgagccgcgagtgtgagattaagtacacgggcttcagggaccggccccacgaggaacgccaggcacgcttccagaacgcctgccgcgacggccgctcggaaatcgcttttgtggccacaggaaccaatctgtctctccagttttttccggccagctggcagggagaacagcgacaaacacctagccgagagtatgtcgacttagaaagagaagcaggcaaggtatatttgaaggctcccatgattctgaatggagtctgtgttatctggaaaggctggattgatctccaaagactggatggtatgggctgtctggagtttgatgaggagcgagcccagcaggaggatgcattagcacaacaggcctttgaagaggctcggagaaggacacgcgaatttgaagatagagacaggtctcatcgggaggaaatggagggcgggagcggcgggtccggcgggagcggcggctccgggggcgggccattttctactcaggacacagatttagacttggagatgttagctccctatatcccaatggatgatgacttccagttacgttgatgatgaggactagtccctgttcccagagcccacttttttttctttttttgaaataaaatagcctgtctttcagatctaaaaaaaaaaaaaaaaaaaaaaaaaaaaaaaaaaaaaaaaaaaaaaaaaaaaaaaaaaaaaaaaaaaaaaaaaaaaaaaaaaaaaaaaaaaaaaaaaaaa

SEQ ID NO: 1074 - RNA, 2513 nt, synthetic construct
  misc_feature 1..2513: note = Artificial____RUNX1(1-177)_N_RUNX1T1a(31-604) mRNA wt
  source 1..2513: mol_type = other RNA
aggagagtcccgcagtcggcgtccagcggctctgcttgttcgtgtgtgtgtcgttgcaggccttattcaagcttaccatgcgtatccccgtagatgccagcacgagccgccgcttcacgccgccttccaccgcgctgagcccaggcaagatgagcgaggcgttgccgctgggcgccccggacgccggcgctgccctggccggcaagctgaggagcggcgaccgcagcatggtggaggtgctggccgaccacccgggcgagctggtgcgcaccgacagccccaacttcctctgctccgtgctgcctacgcactggcgctgcaacaagaccctgcccatcgctttcaaggtggtggccctaggggatgttccagatggcactctggtcactgtgatggctggcaatgatgaaaactactcggctgagctgagaaatgctaccgcagccatgaagaaccaggttgcaagatttaatgacctcaggtttgtcggtcgaagtggaagagggaaaagcttcactctgaccatcactgtcttcacaaacccaccgcaagtcgccacctaccacagagccatcaaaatcacagtggatgggccccgagaacctcgaaaccgtactgagaagcactccacaatgccagactcacctgtggatgtgaagacgcaatctaggctgactcctccaacaatgccacctcccccaactactcaaggagctccaagaaccagttcatttacaccgacaacgttaactaatggcacgagccattctcctacagccttgaatggcgccccctcaccacccaatggcttcagcaatgggccttcctcttcttcctcctcctctctggctaatcaacagctgcccccagcctgtggtgccaggcaactcagcaagctgaaaaggttccttactaccctgcagcagtttggcaatgacatttcacccgagataggagaaagagttcgcaccctcgttctgggactagtgaactccactttgacaattgaagaatttcattccaaactgcaagaagctactaacttcccactgagaccttttgtcatcccatttttgaaggccaacttgcccctgctgcagcgtgagctcctccactgcgcaagactggccaaacagaaccctgcccagtacctcgcccagcatgaacagctgcttctggatgccagcaccacctcacctgttgactcctcagagctgcttctcgatgtgaacgaaaacgggaagaggcgaactccagacagaaccaaagaaaatggctttgacagagagcctttgcactcagaacatccaagcaagcgaccatgcactattagcccaggccagcggtacagtccaaataacggcttatcctaccagcccaatggcctgcctcaccctaccccacctccacctcagcattaccgtttggatgatatggccattgcccaccactacagggactcctatcgacaccccagccacagggacctcagggacagaaacagacctatggggttgcatggcacacgtcaagaagaaatgattgatcacagactaacagacagagaatgggcagaagagtggaaacatcttgaccatctgttaaactgcataatggacatggtagaaaaaacaaggcgatctctcaccgtactaaggcggtgtcaagaagcagaccgggaagaattgaattactggatccggcggtacagtgacgccgaggacttaaaaaaaggtggcggcagtagcagcagccactctaggcagcagagtcccgtcaacccagacccagttgcactagacgcgcatcgggaattccttcacaggcctgcgtctggatacgtgccagaggagatctggaagaaagctgaggaggccgtcaatgaggtgaagcgccaggcgatgacggagctgcagaaggccgtgtctgaggcggagcggaaagcccacgacatgatcacaacagagagggccaagatggagcgcacggtcgccgaggccaaacggcaggcggcggaggacgcactggcagttatcaatcagcaggaggattcaagcgagagttgctggaattgtggccgtaaagcgagtgaaacctgcagtggctgtaacacagcccgatactgtggctcattttgccagcacaaagactgggagaagcaccatcacatctgtggacagaccctgcaggcccagcagcagggagacacacctgcagtcagctcctctgtcacgcccaacagcggggctgggagcccgatggacacaccaccagcagccactccgaggtcaaccaccccgggaaccccttccaccatagagacaacccctcgctgatgatgaggactagtccctgttcccagagcccacttttttttctttttttgaaataaaatagcctgtctttcagatctaaaaaaaaaaaaaaaaaaaaaaaaaaaaaaaaaaaaaaaaaaaaaaaaaaaaaaaaaaaaaaaaaaaaaaaaaaaaaaaaaaaaaaaaaaaaaaaaaaaa

SEQ ID NO: 1075 - RNA, 1028 nt, synthetic construct
  misc_feature 1..1028: note = Artificial____RUNX1(1-241)_RUNX1T1b(short) mRNA wt
  source 1..1028: mol_type = other RNA
aggagagtcccgcagtcggcgtccagcggctctgcttgttcgtgtgtgtgtcgttgcaggccttattcaagcttaccatgcgtatccccgtagatgccagcacgagccgccgcttcacgccgccttccaccgcgctgagcccaggcaagatgagcgaggcgttgccgctgggcgccccggacgccggcgctgccctggccggcaagctgaggagcggcgaccgcagcatggtggaggtgctggccgaccacccgggcgagctggtgcgcaccgacagccccaacttcctctgctccgtgctgcctacgcactggcgctgcaacaagaccctgcccatcgctttcaaggtggtggccctaggggatgttccagatggcactctggtcactgtgatggctggcaatgatgaaaactactcggctgagctgagaaatgctaccgcagccatgaagaaccaggttgcaagatttaatgacctcaggtttgtcggtcgaagtggaagagggaaaagcttcactctgaccatcactgtcttcacaaacccaccgcaagtcgccacctaccacagagccatcaaaatcacagtggatgggccccgagaacctcgaagacatcggcagaaactagatgatcagaccaagcccgggagcttgtccttttccgagcggctcagtgaactggagcagctgcggcgcacagccatgagggtcagcccacaccacccagcccccacgcccaaccctcgtgcctccctgaaccactccactgcctttaaccctcagcctcagagtcagatgcaggaggtgggcttctgccacgtcgcccaggtggggctgaagctcctgggctgatgatgaggactagtccctgttcccagagcccacttttttttctttttttgaaataaaatagcctgtctttcagatctaaaaaaaaaaaaaaaaaaaaaaaaaaaaaaaaaaaaaaaaaaaaaaaaaaaaaaaaaaaaaaaaaaaaaaaaaaaaaaaaaaaaaaaaaaaaaaaaaaaa

SEQ ID NO: 1076 - RNA, 2732 nt, synthetic construct
  misc_feature 1..2732: note = Artificial____RUNX1(1-241)_V_RUNX1T1b(22-604) mRNA wt
  source 1..2732: mol_type = other RNA
aggagagtcccgcagtcggcgtccagcggctctgcttgttcgtgtgtgtgtcgttgcaggccttattcaagcttaccatgcgtatccccgtagatgccagcacgagccgccgcttcacgccgccttccaccgcgctgagcccaggcaagatgagcgaggcgttgccgctgggcgccccggacgccggcgctgccctggccggcaagctgaggagcggcgaccgcagcatggtggaggtgctggccgaccacccgggcgagctggtgcgcaccgacagccccaacttcctctgctccgtgctgcctacgcactggcgctgcaacaagaccctgcccatcgctttcaaggtggtggccctaggggatgttccagatggcactctggtcactgtgatggctggcaatgatgaaaactactcggctgagctgagaaatgctaccgcagccatgaagaaccaggttgcaagatttaatgacctcaggtttgtcggtcgaagtggaagagggaaaagcttcactctgaccatcactgtcttcacaaacccaccgcaagtcgccacctaccacagagccatcaaaatcacagtggatgggccccgagaacctcgaagacatcggcagaaactagatgatcagaccaagcccgggagcttgtccttttccgagcggctcagtgaactggagcagctgcggcgcacagccatgagggtcagcccacaccacccagcccccacgcccaaccctcgtgcctccctgaaccactccactgcctttaaccctcagcctcagagtcagatgcaggtgggtcctgagaaaagggtgccagcgatgcctggatcgcctgtggaagtgaagatacagtccagatcctcacctcccaccatgccacccctcccaccaataaatcctggaggaccgaggccagtgtccttcactcctactgcattaagcaatggcatcaaccattctcctcctaccctgaatggtgccccatcaccgccacagagattcagcaatggtcctgcctcctccacatcatctgcactcacaaatcagcaattgccagccacttgtggtgctcgacaactcagcaagttgaaacgctttcttaccactctgcaacagtttggcaatgacatctcccctgagattggggagaaggtgcggactcttgttcttgcactggtgaactcaacagtgacaattgaggaattccactgtaagctccaagaagccacaaactttccccttcgtccttttgtgattccatttctcaaggccaacctgcccctgctgcagcgggaactgctgcactgcgctcgggcggccaagcagaccccatcccagtacctggctcagcacgaacaccttctgctcaacacaagcattgcatcgcctgctgactcgtcagagttgctcatggaggtgcacggaaatgggaagaggcccagtccagagaggagagaagagaatagttttgatagagacacaattgctcctgagcctcctgccaagagagtatgtaccatcagccctgctcctcggcacagtcctgctctcactgtgcccctcatgaatcccgggggccaattccatcctacccctccacctcttcagcattacaccttagaggatattgcaacttctcacctgtatcgggaacccaacaagatgctagagcatcgagaagttcgtgatagacaccacagtcttggtctaaatggaggctatcaagatgagttggtagatcatcgtttgacagaaagggaatgggctgatgaatggaaacatcttgaccatgcgctgaattgcattatggaaatggtagagaaaacaaggcgctctatggcagttctgcggcgctgtcaggaatcagatcgtgaagaactcaactactggaaaagacggtacaatgaaaacacagagctgaggaaaacggggaccgagttggtctccaggcagcacagccctgggagtgcagattctctcagcaatgattctcagagagagttcaacagcaggccaggtacaggatacgtacctgtggagttttggaaaaaaacagaagaagctgtgaataaggtgaaaattcaggccatgtcagaagtacagaaggccgtcgctgaggcagagcagaaagcctttgaagtgattgcaacagagagagcacgaatggagcaaaccatagcggatgtcaagcggcaggccgcagaggatgctttcctcgtcatcaatgagcaagaggagtccacggagaactgctggaactgtggccgcaaagccagcgagacatgcagtggctgcaatatcgcgcgatactgtggctctttctgccagcacaaggactgggagcggcaccaccgcctctgtggtcagaacctgcatggccagagcccccacggccagggccggccgctgcttcctgtaggcaggggctcctctgccaggtccgccgactgcagcgtgcccagcccagccctcgacaagacctcggcaaccacatcgcgttcctcaacacctgcttctgtgacagctatcgacaccaacggactctgatgatgaggactagtccctgttcccagagcccacttttttttctttttttgaaataaaatagcctgtctttcagatctaaaaaaaaaaaaaaaaaaaaaaaaaaaaaaaaaaaaaaaaaaaaaaaaaaaaaaaaaaaaaaaaaaaaaaaaaaaaaaaaaaaaaaaaaaaaaaaaaaaa

SEQ ID NO: 1077 - RNA, 2732 nt, synthetic construct
  misc_feature 1..2732: note = Artificial____RUNX1(1-241)_I_RUNX1T1b(22-604) mRNA wt
  source 1..2732: mol_type = other RNA
aggagagtcccgcagtcggcgtccagcggctctgcttgttcgtgtgtgtgtcgttgcaggccttattcaagcttaccatgcgtatccccgtagatgccagcacgagccgccgcttcacgccgccttccaccgcgctgagcccaggcaagatgagcgaggcgttgccgctgggcgccccggacgccggcgctgccctggccggcaagctgaggagcggcgaccgcagcatggtggaggtgctggccgaccacccgggcgagctggtgcgcaccgacagccccaacttcctctgctccgtgctgcctacgcactggcgctgcaacaagaccctgcccatcgctttcaaggtggtggccctaggggatgttccagatggcactctggtcactgtgatggctggcaatgatgaaaactactcggctgagctgagaaatgctaccgcagccatgaagaaccaggttgcaagatttaatgacctcaggtttgtcggtcgaagtggaagagggaaaagcttcactctgaccatcactgtcttcacaaacccaccgcaagtcgccacctaccacagagccatcaaaatcacagtggatgggccccgagaacctcgaagacatcggcagaaactagatgatcagaccaagcccgggagcttgtccttttccgagcggctcagtgaactggagcagctgcggcgcacagccatgagggtcagcccacaccacccagcccccacgcccaaccctcgtgcctccctgaaccactccactgcctttaaccctcagcctcagagtcagatgcagatcggtcctgagaaaagggtgccagcgatgcctggatcgcctgtggaagtgaagatacagtccagatcctcacctcccaccatgccacccctcccaccaataaatcctggaggaccgaggccagtgtccttcactcctactgcattaagcaatggcatcaaccattctcctcctaccctgaatggtgccccatcaccgccacagagattcagcaatggtcctgcctcctccacatcatctgcactcacaaatcagcaattgccagccacttgtggtgctcgacaactcagcaagttgaaacgctttcttaccactctgcaacagtttggcaatgacatctcccctgagattggggagaaggtgcggactcttgttcttgcactggtgaactcaacagtgacaattgaggaattccactgtaagctccaagaagccacaaactttccccttcgtccttttgtgattccatttctcaaggccaacctgcccctgctgcagcgggaactgctgcactgcgctcgggcggccaagcagaccccatcccagtacctggctcagcacgaacaccttctgctcaacacaagcattgcatcgcctgctgactcgtcagagttgctcatggaggtgcacggaaatgggaagaggcccagtccagagaggagagaagagaatagttttgatagagacacaattgctcctgagcctcctgccaagagagtatgtaccatcagccctgctcctcggcacagtcctgctctcactgtgcccctcatgaatcccgggggccaattccatcctacccctccacctcttcagcattacaccttagaggatattgcaacttctcacctgtatcgggaacccaacaagatgctagagcatcgagaagttcgtgatagacaccacagtcttggtctaaatggaggctatcaagatgagttggtagatcatcgtttgacagaaagggaatgggctgatgaatggaaacatcttgaccatgcgctgaattgcattatggaaatggtagagaaaacaaggcgctctatggcagttctgcggcgctgtcaggaatcagatcgtgaagaactcaactactggaaaagacggtacaatgaaaacacagagctgaggaaaacggggaccgagttggtctccaggcagcacagccctgggagtgcagattctctcagcaatgattctcagagagagttcaacagcaggccaggtacaggatacgtacctgtggagttttggaaaaaaacagaagaagctgtgaataaggtgaaaattcaggccatgtcagaagtacagaaggccgtcgctgaggcagagcagaaagcctttgaagtgattgcaacagagagagcacgaatggagcaaaccatagcggatgtcaagcggcaggccgcagaggatgctttcctcgtcatcaatgagcaagaggagtccacggagaactgctggaactgtggccgcaaagccagcgagacatgcagtggctgcaatatcgcgcgatactgtggctctttctgccagcacaaggactgggagcggcaccaccgcctctgtggtcagaacctgcatggccagagcccccacggccagggccggccgctgcttcctgtaggcaggggctcctctgccaggtccgccgactgcagcgtgcccagcccagccctcgacaagacctcggcaaccacatcgcgttcctcaacacctgcttctgtgacagctatcgacaccaacggactctgatgatgaggactagtccctgttcccagagcccacttttttttctttttttgaaataaaatagcctgtctttcagatctaaaaaaaaaaaaaaaaaaaaaaaaaaaaaaaaaaaaaaaaaaaaaaaaaaaaaaaaaaaaaaaaaaaaaaaaaaaaaaaaaaaaaaaaaaaaaaaaaaaa

SEQ ID NO: 1078 - RNA, 1616 nt, synthetic construct
  misc_feature 1..1616: note = Homo sapiens__Q01196-1__RUNX1(K83E_R174Q) mRNA wt mod
  source 1..1616: mol_type = other RNA
aggagagtcccgcagtcggcgtccagcggctctgcttgttcgtgtgtgtgtcgttgcaggccttattcaagcttaccatgcgtatccccgtagatgccagcacgagccgccgcttcacgccgccttccaccgcgctgagcccaggcaagatgagcgaggcgttgccgctgggcgccccggacgccggcgctgccctggccggcaagctgaggagcggcgaccgcagcatggtggaggtgctggccgaccacccgggcgagctggtgcgcaccgacagccccaacttcctctgctccgtgctgcctacgcactggcgctgcaacgagaccctgcccatcgctttcaaggtggtggccctaggggatgttccagatggcactctggtcactgtgatggctggcaatgatgaaaactactcggctgagctgagaaatgctaccgcagccatgaagaaccaggttgcaagatttaatgacctcaggtttgtcggtcgaagtggaagagggaaaagtttcactctgaccatcactgtcttcacaaacccaccgcaagtcgccacctaccacagagccatcaaaatcacagtggatgggccccaggaacctcgaagacatcggcagaaactagatgatcagaccaagcccgggagcttgtccttttccgagcggctcagtgaactggagcagctgcggcgcacagccatgagggtcagcccacaccacccagcccccacgcccaaccctcgtgcctccctgaaccactccactgcctttaaccctcagcctcagagtcagatgcaggatacaaggcagatccaaccatccccaccgtggtcctacgatcagtcctaccaatacctgggatccattgcctctccttctgtgcacccagcaacgcccatttcacctggacgtgccagcggcatgacaaccctctctgcagaactttccagtcgactctcaacggcacccgacctgacagcgttcagcgacccgcgccagttccccgcgctgccctccatctccgacccccgcatgcactatccaggcgccttcacctactccccgacgccggtcacctcgggcatcggcatcggcatgtcggccatgggctcggccacgcgctaccacacctacctgccgccgccctaccccggctcgtcgcaagcgcagggaggcccgttccaagccagctcgccctcctaccacctgtactacggcgcctcggccggctcctaccagttctccatggtgggcggcgagcgctcgccgccgcgcatcctgccgccctgcaccaacgcctccaccggctccgcgctgctcaaccccagcctcccgaaccagagcgacgtggtggaggccgagggcagccacagcaactcccccaccaacatggcgccctccgcgcgcctggaggaggccgtgtggaggccctactgatgatgaggactagtccctgttcccagagcccacttttttttctttttttgaaataaaatagcctgtctttcagatctaaaaaaaaaaaaaaaaaaaaaaaaaaaaaaaaaaaaaaaaaaaaaaaaaaaaaaaaaaaaaaaaaaaaaaaaaaaaaaaaaaaaaaaaaaaaaaaaaaaa

SEQ ID NO: 1079 - RNA, 2090 nt, synthetic construct
  misc_feature 1..2090: note = Homo sapiens____CBFbeta(1-165)_SMMHC(1527-1972) mRNA wt mod
  source 1..2090: mol_type = other RNA
aggagagtcccgcagtcggcgtccagcggctctgcttgttcgtgtgtgtgtcgttgcaggccttattcaagcttaccatgccgcgcgtcgtgcccgaccagagaagcaagtttgagaacgaggagttctttaggaagctgagccgcgagtgtgagattaagtacacgggctttagggaccggccccacgaggaacgccaggcacgcttccagaacgcctgccgcgacggccgctcggaaatcgcttttgtggccacaggaaccaatctgtctctccagttctttccggccagctggcagggagaacagcgacaaacacctagccgagagtatgtcgacttagaaagagaagcaggcaaggtatatttgaaggctcccatgattctgaatggagtctgtgttatctggaaaggctggattgatctccaaagactggatggtatgggctgtctggagtttgatgaggagcgagcccagcaggaggatgcattagcacaacaggcctttgaagaggctcggagaaggacacgcgaatttgaagatagagacaggtctcatcgggaggaaatggaggtccatgagctggagaagtccaagcgggccctggagacccagatggaggagatgaagacgcagctggaggaactggaggacgagctgcaagccacggaggacgccaaactgcggctggaagtcaacatgcaggcgctcaagggccagttcgaaagggatctccaagcccgggacgagcagaatgaggagaagaggaggcaactgcagagacagcttcacgagtatgagacggaactggaagacgagcgaaagcaacgtgccctggcagctgcagcaaagaagaagctggaaggggacctgaaagacctggagcttcaggccgactctgccatcaaggggagggaggaagccatcaagcagctacgcaaactgcaggctcagatgaaggactttcaaagagagctggaagatgcccgtgcctccagagatgagatctttgccacagccaaagagaatgagaagaaagccaagagcttggaagcagacctcatgcagctacaagaggacctcgccgccgctgagagggctcgcaaacaagcggacctcgagaaggaggaactggcagaggagctggccagtagcctgtcgggaaggaacgcactccaggacgagaagcgccgcctggaggcccggatcgcccagctggaggaggagctggaggaggagcagggcaacatggaggccatgagcgaccgggtccgcaaagccacacagcaggccgagcagctcagcaacgagctggccacagagcgcagcacggcccagaagaatgagagtgcccggcagcagctcgagcggcagaacaaggagctccggagcaagctccacgagatggagggggccgtcaagtccaagttcaagtccaccatcgcggcgctggaggccaagattgcacagctggaggagcaggtcgagcaggaggccagagagaaacaggcggccaccaagtcgctgaagcagaaagacaagaagctgaaggaaatcttgctccaggtggaggacgagcgcaagatggccgagcagtacaaggagcaggcagagaaaggcaatgccagggtcaagcagctgaagaggcagctggaggaggcagaggaggagtcccagcgcatcaacgccaaccgcaggaagctgcagcgggagctggatgaggccacggagagcaacgaggccatgggccgcgaggtgaacgcactcaagagcaagctcaggcgaggaaacgagacctctttcgttccttctagaaggtctggaggacgtagagttattgaaaatgcagatggttctgaggaggaaacggacactcgagacgcagacttcaatggaaccaaggccagtgaatgatgatgaggactagtccctgttcccagagcccacttttttttctttttttgaaataaaatagcctgtctttcagatctaaaaaaaaaaaaaaaaaaaaaaaaaaaaaaaaaaaaaaaaaaaaaaaaaaaaaaaaaaaaaaaaaaaaaaaaaaaaaaaaaaaaaaaaaaaaaaaaaaaa

SEQ ID NO: 1080 - RNA, 1805 nt, synthetic construct
  misc_feature 1..1805: note = Artificial____CBFbeta(1-165)_SMMHC(1527-1877) mRNA wt mod
  source 1..1805: mol_type = other RNA
aggagagtcccgcagtcggcgtccagcggctctgcttgttcgtgtgtgtgtcgttgcaggccttattcaagcttaccatgccgcgcgtcgtgcccgaccagagaagcaagtttgagaacgaggagttctttaggaagctgagccgcgagtgtgagattaagtacacgggctttagggaccggccccacgaggaacgccaggcacgcttccagaacgcctgccgcgacggccgctcggaaatcgcttttgtggccacaggaaccaatctgtctctccagttctttccggccagctggcagggagaacagcgacaaacacctagccgagagtatgtcgacttagaaagagaagcaggcaaggtatatttgaaggctcccatgattctgaatggagtctgtgttatctggaaaggctggattgatctccaaagactggatggtatgggctgtctggagtttgatgaggagcgagcccagcaggaggatgcattagcacaacaggcctttgaagaggctcggagaaggacacgcgaatttgaagatagagacaggtctcatcgggaggaaatggaggtccatgagctggagaagtccaagcgggccctggagacccagatggaggagatgaagacgcagctggaggaactggaggacgagctgcaagccacggaggacgccaaactgcggctggaagtcaacatgcaggcgctcaagggccagttcgaaagggatctccaagcccgggacgagcagaatgaggagaagaggaggcaactgcagagacagcttcacgagtatgagacggaactggaagacgagcgaaagcaacgtgccctggcagctgcagcaaagaagaagctggaaggggacctgaaagacctggagcttcaggccgactctgccatcaaggggagggaggaagccatcaagcagctacgcaaactgcaggctcagatgaaggactttcaaagagagctggaagatgcccgtgcctccagagatgagatctttgccacagccaaagagaatgagaagaaagccaagagcttggaagcagacctcatgcagctacaagaggacctcgccgccgctgagagggctcgcaaacaagcggacctcgagaaggaggaactggcagaggagctggccagtagcctgtcgggaaggaacgcactccaggacgagaagcgccgcctggaggcccggatcgcccagctggaggaggagctggaggaggagcagggcaacatggaggccatgagcgaccgggtccgcaaagccacacagcaggccgagcagctcagcaacgagctggccacagagcgcagcacggcccagaagaatgagagtgcccggcagcagctcgagcggcagaacaaggagctccggagcaagctccacgagatggagggggccgtcaagtccaagttcaagtccaccatcgcggcgctggaggccaagattgcacagctggaggagcaggtcgagcaggaggccagagagaaacaggcggccaccaagtcgctgaagcagaaagacaagaagctgaaggaaatcttgctccaggtggaggacgagcgcaagatggccgagcagtacaaggagcaggcagagaaaggcaatgcctgatgatgaggactagtccctgttcccagagcccacttttttttctttttttgaaataaaatagcctgtctttcagatctaaaaaaaaaaaaaaaaaaaaaaaaaaaaaaaaaaaaaaaaaaaaaaaaaaaaaaaaaaaaaaaaaaaaaaaaaaaaaaaaaaaaaaaaaaaaaaaaaaaa

SEQ ID NO: 1081 - RNA, 866 nt, synthetic construct
  misc_feature 1..866: note = Artificial____CBFbeta(1-165)_Linker_Lifeact mRNA wt mod
  source 1..866: mol_type = other RNA
aggagagtcccgcagtcggcgtccagcggctctgcttgttcgtgtgtgtgtcgttgcaggccttattcaagcttaccatgccgcgcgtcgtgcccgaccagagaagcaagtttgagaacgaggagttctttaggaagctgagccgcgagtgtgagattaagtacacgggctttagggaccggccccacgaggaacgccaggcacgcttccagaacgcctgccgcgacggccgctcggaaatcgcttttgtggccacaggaaccaatctgtctctccagttctttccggccagctggcagggagaacagcgacaaacacctagccgagagtatgtcgacttagaaagagaagcaggcaaggtatatttgaaggctcccatgattctgaatggagtctgtgttatctggaaaggctggattgatctccaaagactggatggtatgggctgtctggagtttgatgaggagcgagcccagcaggaggatgcattagcacaacaggcctttgaagaggctcggagaaggacacgcgaatttgaagatagagacaggtctcatcgggaggaaatggagggcgggagcggcgggtccggcgggagcggcggctccgggggcgggggcgtggccgacctgatcaagaagttcgagagcatctccaaggaggagggggacccgcccgtcgccacctgatgatgaggactagtccctgttcccagagcccacttttttttctttttttgaaataaaatagcctgtctttcagatctaaaaaaaaaaaaaaaaaaaaaaaaaaaaaaaaaaaaaaaaaaaaaaaaaaaaaaaaaaaaaaaaaaaaaaaaaaaaaaaaaaaaaaaaaaaaaaaaaaaa

SEQ ID NO: 1082 - RNA, 833 nt, synthetic construct
  misc_feature 1..833: note = Artificial____CBFbeta(1-165)_HIF1alpha(549-575) mRNA wt mod
  source 1..833: mol_type = other RNA
aggagagtcccgcagtcggcgtccagcggctctgcttgttcgtgtgtgtgtcgttgcaggccttattcaagcttaccatgccgcgcgtcgtgcccgaccagagaagcaagtttgagaacgaggagttctttaggaagctgagccgcgagtgtgagattaagtacacgggctttagggaccggccccacgaggaacgccaggcacgcttccagaacgcctgccgcgacggccgctcggaaatcgcttttgtggccacaggaaccaatctgtctctccagttctttccggccagctggcagggagaacagcgacaaacacctagccgagagtatgtcgacttagaaagagaagcaggcaaggtatatttgaaggctcccatgattctgaatggagtctgtgttatctggaaaggctggattgatctccaaagactggatggtatgggctgtctggagtttgatgaggagcgagcccagcaggaggatgcattagcacaacaggcctttgaagaggctcggagaaggacacgcgaatttgaagatagagacaggtctcatcgggaggaaatggagccattttctactcaggacacagatttagacttggagatgttagctccctatatcccaatggatgatgacttccagttacgttgatgatgaggactagtccctgttcccagagcccacttttttttctttttttgaaataaaatagcctgtctttcagatctaaaaaaaaaaaaaaaaaaaaaaaaaaaaaaaaaaaaaaaaaaaaaaaaaaaaaaaaaaaaaaaaaaaaaaaaaaaaaaaaaaaaaaaaaaaaaaaaaaaa

SEQ ID NO: 1083 - RNA, 878 nt, synthetic construct
  misc_feature 1..878: note Artificial____CBFbeta(1-165)_Linker_HIF1alpha(549-575) mRNA wt mod
  source 1..878: mol_type = other RNA
aggagagtcccgcagtcggcgtccagcggctctgcttgttcgtgtgtgtgtcgttgcaggccttattcaagcttaccatgccgcgcgtcgtgcccgaccagagaagcaagtttgagaacgaggagttctttaggaagctgagccgcgagtgtgagattaagtacacgggctttagggaccggccccacgaggaacgccaggcacgcttccagaacgcctgccgcgacggccgctcggaaatcgcttttgtggccacaggaaccaatctgtctctccagttctttccggccagctggcagggagaacagcgacaaacacctagccgagagtatgtcgacttagaaagagaagcaggcaaggtatatttgaaggctcccatgattctgaatggagtctgtgttatctggaaaggctggattgatctccaaagactggatggtatgggctgtctggagtttgatgaggagcgagcccagcaggaggatgcattagcacaacaggcctttgaagaggctcggagaaggacacgcgaatttgaagatagagacaggtctcatcgggaggaaatggagggcgggagcggcgggtccggcgggagcggcggctccgggggcgggccattttctactcaggacacagatttagacttggagatgttagctccctatatcccaatggatgatgacttccagttacgttgatgatgaggactagtccctgttcccagagcccacttttttttctttttttgaaataaaatagcctgtctttcagatctaaaaaaaaaaaaaaaaaaaaaaaaaaaaaaaaaaaaaaaaaaaaaaaaaaaaaaaaaaaaaaaaaaaaaaaaaaaaaaaaaaaaaaaaaaaaaaaaaaaa

SEQ ID NO: 1084 - RNA, 2513 nt, synthetic construct
  misc_feature 1..2513: note = Artificial____RUNX1(1-177)_N_RUNX1T1a(31-604) mRNA wt mod
  source 1..2513: mol_type = other RNA
aggagagtcccgcagtcggcgtccagcggctctgcttgttcgtgtgtgtgtcgttgcaggccttattcaagcttaccatgcgtatccccgtagatgccagcacgagccgccgcttcacgccgccttccaccgcgctgagcccaggcaagatgagcgaggcgttgccgctgggcgccccggacgccggcgctgccctggccggcaagctgaggagcggcgaccgcagcatggtggaggtgctggccgaccacccgggcgagctggtgcgcaccgacagccccaacttcctctgctccgtgctgcctacgcactggcgctgcaacaagaccctgcccatcgctttcaaggtggtggccctaggggatgttccagatggcactctggtcactgtgatggctggcaatgatgaaaactactcggctgagctgagaaatgctaccgcagccatgaagaaccaggttgcaagatttaatgacctcaggtttgtcggtcgaagtggaagagggaaaagtttcactctgaccatcactgtcttcacaaacccaccgcaagtcgccacctaccacagagccatcaaaatcacagtggatgggccccgagaacctcgaaaccgtactgagaagcactccacaatgccagactcacctgtggatgtgaagacgcaatctaggctgactcctccaacaatgccacctcccccaactactcaaggagctccaagaaccagttcatttacaccgacaacgttaactaatggcacgagccattctcctacagccttgaatggcgccccctcaccacccaatggcttcagcaatgggccttcctcttcttcctcctcctctctggctaatcaacagctgcccccagcctgtggtgccaggcaactcagcaagctgaaaaggttccttactaccctgcagcagtttggcaatgacatttcacccgagataggagaaagagttcgcaccctcgttctgggacttgtgaactccactttgacaattgaagaatttcattccaaactgcaagaagctactaacttcccactgagaccttttgtcatcccatttttgaaggccaacttgcccctgctgcagcgtgagctcctccactgcgcaagactggccaaacagaaccctgcccagtacctcgcccagcatgaacagctgcttctggatgccagcaccacctcacctgttgactcctcagagctgcttctcgatgtgaacgaaaacgggaagaggcgaactccagacagaaccaaagaaaatggctttgacagagagcctttgcactcagaacatccaagcaagcgaccatgcactattagcccaggccagcggtacagtccaaataacggcttatcctaccagcccaatggcctgcctcaccctaccccacctccacctcagcattaccgtttggatgatatggccattgcccaccactacagggactcctatcgacaccccagccacagggacctcagggacagaaacagacctatggggttgcatggcacacgtcaagaagaaatgattgatcacagactaacagacagagaatgggcagaagagtggaaacatcttgaccatctgttaaactgcataatggacatggtagaaaaaacaaggcgatctctcaccgtactaaggcggtgtcaagaagcagaccgggaagaattgaattactggatccggcggtacagtgacgccgaggacttaaaaaaaggtggcggcagtagcagcagccactctaggcagcagagtcccgtcaacccagacccagttgcactagacgcgcatcgggagttccttcacaggcctgcgtctggatacgtgccagaggagatctggaagaaagctgaggaggccgtcaatgaggtgaagcgccaggcgatgacggagctgcagaaggccgtgtctgaggcggagcggaaagcccacgacatgatcacaacagagagggccaagatggagcgcacggtcgccgaggccaaacggcaggcggcggaggacgcactggcagttatcaatcagcaggaggattcaagcgagagttgctggaattgtggccgtaaagcgagtgaaacctgcagtggctgtaacacagcccgatactgtggctcattttgccagcacaaagactgggagaagcaccatcacatctgtggacagaccctgcaggcccagcagcagggagacacacctgcagtcagctcctctgtcacgcccaacagcggggctgggagcccgatggacacaccaccagcagccactccgaggtcaaccaccccgggaaccccttccaccatagagacaacccctcgctgatgatgaggactagtccctgttcccagagcccacttttttttctttttttgaaataaaatagcctgtctttcagatctaaaaaaaaaaaaaaaaaaaaaaaaaaaaaaaaaaaaaaaaaaaaaaaaaaaaaaaaaaaaaaaaaaaaaaaaaaaaaaaaaaaaaaaaaaaaaaaaaaaa

SEQ ID NO: 1085 - RNA, 1028 nt, synthetic construct
  misc_feature 1..1028: note = Artificial____RUNX1(1-241)_RUNX1T1b(short) mRNA wt mod
  source 1..1028: mol_type = other RNA
aggagagtcccgcagtcggcgtccagcggctctgcttgttcgtgtgtgtgtcgttgcaggccttattcaagcttaccatgcgtatccccgtagatgccagcacgagccgccgcttcacgccgccttccaccgcgctgagcccaggcaagatgagcgaggcgttgccgctgggcgccccggacgccggcgctgccctggccggcaagctgaggagcggcgaccgcagcatggtggaggtgctggccgaccacccgggcgagctggtgcgcaccgacagccccaacttcctctgctccgtgctgcctacgcactggcgctgcaacaagaccctgcccatcgctttcaaggtggtggccctaggggatgttccagatggcactctggtcactgtgatggctggcaatgatgaaaactactcggctgagctgagaaatgctaccgcagccatgaagaaccaggttgcaagatttaatgacctcaggtttgtcggtcgaagtggaagagggaaaagtttcactctgaccatcactgtcttcacaaacccaccgcaagtcgccacctaccacagagccatcaaaatcacagtggatgggccccgagaacctcgaagacatcggcagaaactagatgatcagaccaagcccgggagcttgtccttttccgagcggctcagtgaactggagcagctgcggcgcacagccatgagggtcagcccacaccacccagcccccacgcccaaccctcgtgcctccctgaaccactccactgcctttaaccctcagcctcagagtcagatgcaggaggtgggcttctgccacgtcgcccaggtggggctgaagctcctgggctgatgatgaggactagtccctgttcccagagcccacttttttttctttttttgaaataaaatagcctgtctttcagatctaaaaaaaaaaaaaaaaaaaaaaaaaaaaaaaaaaaaaaaaaaaaaaaaaaaaaaaaaaaaaaaaaaaaaaaaaaaaaaaaaaaaaaaaaaaaaaaaaaaa

SEQ ID NO: 1086 - RNA, 2732 nt, synthetic construct
  misc_feature 1..2732: note = Artificial____RUNX1(1-241)_V_RUNX1T1b(22-604) mRNA wt mod
  source 1..2732: mol_type = other RNA
aggagagtcccgcagtcggcgtccagcggctctgcttgttcgtgtgtgtgtcgttgcaggccttattcaagcttaccatgcgtatccccgtagatgccagcacgagccgccgcttcacgccgccttccaccgcgctgagcccaggcaagatgagcgaggcgttgccgctgggcgccccggacgccggcgctgccctggccggcaagctgaggagcggcgaccgcagcatggtggaggtgctggccgaccacccgggcgagctggtgcgcaccgacagccccaacttcctctgctccgtgctgcctacgcactggcgctgcaacaagaccctgcccatcgctttcaaggtggtggccctaggggatgttccagatggcactctggtcactgtgatggctggcaatgatgaaaactactcggctgagctgagaaatgctaccgcagccatgaagaaccaggttgcaagatttaatgacctcaggtttgtcggtcgaagtggaagagggaaaagtttcactctgaccatcactgtcttcacaaacccaccgcaagtcgccacctaccacagagccatcaaaatcacagtggatgggccccgagaacctcgaagacatcggcagaaactagatgatcagaccaagcccgggagcttgtccttttccgagcggctcagtgaactggagcagctgcggcgcacagccatgagggtcagcccacaccacccagcccccacgcccaaccctcgtgcctccctgaaccactccactgcctttaaccctcagcctcagagtcagatgcaggtgggtcctgagaaaagggtgccagcgatgcctggatcgcctgtggaagtgaagatacagtccagatcctcacctcccaccatgccacccctcccaccaataaatcctggaggaccgaggccagtgtccttcactcctactgcattaagcaatggcatcaaccattctcctcctaccctgaatggtgccccatcaccgccacagagattcagcaatggtcctgcctcctccacatcatctgcactcacaaatcagcaattgccagccacttgtggtgctcgacaactcagcaagttgaaacgctttcttaccactctgcaacagtttggcaatgacatctcccctgagattggggagaaggtgcggactcttgttcttgcactggtgaactcaacagtgacaattgaggagttccactgtaagctccaagaagccacaaactttccccttcgtccttttgtgattccatttctcaaggccaacctgcccctgctgcagcgggaactgctgcactgcgctcgggcggccaagcagaccccatcccagtacctggctcagcacgaacaccttctgctcaacacaagcattgcatcgcctgctgactcgtcagagttgctcatggaggtgcacggaaatgggaagaggcccagtccagagaggagagaagagaatagttttgatagagacacaattgctcctgagcctcctgccaagagagtatgtaccatcagccctgctcctcggcacagtcctgctctcactgtgcccctcatgaatcccgggggccaattccatcctacccctccacctcttcagcattacaccttagaggatattgcaacttctcacctgtatcgggaacccaacaagatgctagagcatcgagaagttcgtgatagacaccacagtcttggtctaaatggaggctatcaagatgagttggtagatcatcgtttgacagaaagggaatgggctgatgaatggaaacatcttgaccatgcgctgaattgcattatggaaatggtagagaaaacaaggcgctctatggcagttctgcggcgctgtcaggaatcagatcgtgaagaactcaactactggaaaagacggtacaatgaaaacacagagctgaggaaaacggggaccgagttggtctccaggcagcacagccctgggagtgcagattctctcagcaatgattctcagagagagttcaacagcaggccaggtacaggatacgtacctgtggagttttggaagaaaacagaagaagctgtgaataaggtgaaaattcaggccatgtcagaagtacagaaggccgtcgctgaggcagagcagaaagcctttgaagtgattgcaacagagagagcacgaatggagcaaaccatagcggatgtcaagcggcaggccgcagaggatgctttcctcgtcatcaatgagcaagaggagtccacggagaactgctggaactgtggccgcaaagccagcgagacatgcagtggctgcaatatcgcgcgatactgtggctctttctgccagcacaaggactgggagcggcaccaccgcctctgtggtcagaacctgcatggccagagcccccacggccagggccggccgctgcttcctgtaggcaggggctcctctgccaggtccgccgactgcagcgtgcccagcccagccctcgacaagacctcggcaaccacatcgcgttcctcaacacctgcttctgtgacagctatcgacaccaacggactctgatgatgaggactagtccctgttcccagagcccacttttttttctttttttgaaataaaatagcctgtctttcagatctaaaaaaaaaaaaaaaaaaaaaaaaaaaaaaaaaaaaaaaaaaaaaaaaaaaaaaaaaaaaaaaaaaaaaaaaaaaaaaaaaaaaaaaaaaaaaaaaaaaa

SEQ ID NO: 1087 - RNA, 2732 nt, synthetic construct
  misc_feature 1..2732: note = Artificial____RUNX1(1-241)_I_RUNX1T1b(22-604) mRNA wt mod
  source 1..2732: mol_type = other RNA
aggagagtcccgcagtcggcgtccagcggctctgcttgttcgtgtgtgtgtcgttgcaggccttattcaagcttaccatgcgtatccccgtagatgccagcacgagccgccgcttcacgccgccttccaccgcgctgagcccaggcaagatgagcgaggcgttgccgctgggcgccccggacgccggcgctgccctggccggcaagctgaggagcggcgaccgcagcatggtggaggtgctggccgaccacccgggcgagctggtgcgcaccgacagccccaacttcctctgctccgtgctgcctacgcactggcgctgcaacaagaccctgcccatcgctttcaaggtggtggccctaggggatgttccagatggcactctggtcactgtgatggctggcaatgatgaaaactactcggctgagctgagaaatgctaccgcagccatgaagaaccaggttgcaagatttaatgacctcaggtttgtcggtcgaagtggaagagggaaaagtttcactctgaccatcactgtcttcacaaacccaccgcaagtcgccacctaccacagagccatcaaaatcacagtggatgggccccgagaacctcgaagacatcggcagaaactagatgatcagaccaagcccgggagcttgtccttttccgagcggctcagtgaactggagcagctgcggcgcacagccatgagggtcagcccacaccacccagcccccacgcccaaccctcgtgcctccctgaaccactccactgcctttaaccctcagcctcagagtcagatgcagatcggtcctgagaaaagggtgccagcgatgcctggatcgcctgtggaagtgaagatacagtccagatcctcacctcccaccatgccacccctcccaccaataaatcctggaggaccgaggccagtgtccttcactcctactgcattaagcaatggcatcaaccattctcctcctaccctgaatggtgccccatcaccgccacagagattcagcaatggtcctgcctcctccacatcatctgcactcacaaatcagcaattgccagccacttgtggtgctcgacaactcagcaagttgaaacgctttcttaccactctgcaacagtttggcaatgacatctcccctgagattggggagaaggtgcggactcttgttcttgcactggtgaactcaacagtgacaattgaggagttccactgtaagctccaagaagccacaaactttccccttcgtccttttgtgattccatttctcaaggccaacctgcccctgctgcagcgggaactgctgcactgcgctcgggcggccaagcagaccccatcccagtacctggctcagcacgaacaccttctgctcaacacaagcattgcatcgcctgctgactcgtcagagttgctcatggaggtgcacggaaatgggaagaggcccagtccagagaggagagaagagaatagttttgatagagacacaattgctcctgagcctcctgccaagagagtatgtaccatcagccctgctcctcggcacagtcctgctctcactgtgcccctcatgaatcccgggggccaattccatcctacccctccacctcttcagcattacaccttagaggatattgcaacttctcacctgtatcgggaacccaacaagatgctagagcatcgagaagttcgtgatagacaccacagtcttggtctaaatggaggctatcaagatgagttggtagatcatcgtttgacagaaagggaatgggctgatgaatggaaacatcttgaccatgcgctgaattgcattatggaaatggtagagaaaacaaggcgctctatggcagttctgcggcgctgtcaggaatcagatcgtgaagaactcaactactggaaaagacggtacaatgaaaacacagagctgaggaaaacggggaccgagttggtctccaggcagcacagccctgggagtgcagattctctcagcaatgattctcagagagagttcaacagcaggccaggtacaggatacgtacctgtggagttttggaagaaaacagaagaagctgtgaataaggtgaaaattcaggccatgtcagaagtacagaaggccgtcgctgaggcagagcagaaagcctttgaagtgattgcaacagagagagcacgaatggagcaaaccatagcggatgtcaagcggcaggccgcagaggatgctttcctcgtcatcaatgagcaagaggagtccacggagaactgctggaactgtggccgcaaagccagcgagacatgcagtggctgcaatatcgcgcgatactgtggctctttctgccagcacaaggactgggagcggcaccaccgcctctgtggtcagaacctgcatggccagagcccccacggccagggccggccgctgcttcctgtaggcaggggctcctctgccaggtccgccgactgcagcgtgcccagcccagccctcgacaagacctcggcaaccacatcgcgttcctcaacacctgcttctgtgacagctatcgacaccaacggactctgatgatgaggactagtccctgttcccagagcccacttttttttctttttttgaaataaaatagcctgtctttcagatctaaaaaaaaaaaaaaaaaaaaaaaaaaaaaaaaaaaaaaaaaaaaaaaaaaaaaaaaaaaaaaaaaaaaaaaaaaaaaaaaaaaaaaaaaaaaaaaaaaaa

SEQ ID NO: 1088 - RNA, 1616 nt, synthetic construct
  misc_feature 1..1616: note = Homo sapiens__Q01196-1__RUNX1(K83E_R174Q) mRNA opt1
  source 1..1616: mol_type = other RNA
aggagagtcccgcagtcggcgtccagcggctctgcttgttcgtgtgtgtgtcgttgcaggccttattcaagcttaccatgcgcatccccgtggacgccagcacctcccggcgcttcaccccgcccagcacggccctgtcccccggcaagatgagcgaggcgctccccctgggggccccggacgccggcgccgccctggcggggaagctccggtccggcgaccgcagcatggtcgaggtgctggccgaccaccccggggagctggtgcggaccgactcccccaacttcctctgcagcgtcctgcccacccactggcgctgcaacgagaccctgccgatcgccttcaaggtggtggccctcggcgacgtccccgacggcacgctggtgaccgtgatggcggggaacgacgagaactactccgccgagctgcggaacgccaccgccgccatgaagaaccaggtcgcgcgcttcaacgacctccggttcgtgggccgcagcgggcggggcaagtccttcaccctgacgatcaccgtgttcaccaacccgccccaggtcgccacctaccaccgcgccatcaagatcacggtggacgggccccaggagccccgccggcaccgccagaagctggacgaccagaccaagcccggcagcctctccttcagcgagcggctgtccgagctggagcagctccgccggaccgccatgcgcgtgagcccccaccacccggcccccacccccaacccccgggcgtccctgaaccacagcacggccttcaacccgcagccccagtcccagatgcaggacacccgccagatccagcccagcccgccctggagctacgaccagtcctaccagtacctgggcagcatcgcctcccccagcgtccaccccgccacccccatctccccggggcgcgccagcggcatgaccacgctctccgcggagctgagctcccggctgagcaccgcccccgacctcaccgccttctccgacccccgccagttcccggccctgcccagcatctccgacccccggatgcactaccccggggccttcacctacagcccgacgcccgtgacctccggcatcggcatcgggatgagcgcgatgggctccgccacccgctaccacacctacctgcccccgccctaccccgggagctcccaggcccagggcgggcccttccaggccagcagcccctcctaccacctctactacggcgcgagcgccggctcctaccagttcagcatggtcgggggcgagcggtccccgccccgcatcctgccgccctgcacgaacgccagcaccgggtccgccctgctcaaccccagcctgcccaaccagtccgacgtggtggaggccgagggcagccactccaacagccccaccaacatggcgccctccgcccggctggaggaggccgtgtggcgcccgtactgatgatgaggactagtccctgttcccagagcccacttttttttctttttttgaaataaaatagcctgtctttcagatctaaaaaaaaaaaaaaaaaaaaaaaaaaaaaaaaaaaaaaaaaaaaaaaaaaaaaaaaaaaaaaaaaaaaaaaaaaaaaaaaaaaaaaaaaaaaaaaaaaaa

SEQ ID NO: 1089 - RNA, 2090 nt, synthetic construct
  misc_feature 1..2090: note = Homo sapiens____CBFbeta(1-165)_SMMHC(1527-1972) mRNA opt1
  source 1..2090: mol_type = other RNA
aggagagtcccgcagtcggcgtccagcggctctgcttgttcgtgtgtgtgtcgttgcaggccttattcaagcttaccatgccccgcgtggtcccggaccagcggagcaagttcgagaacgaggagttcttccgcaagctgtcccgggagtgcgagatcaagtacaccggcttccgcgaccggccccacgaggagcgccaggcccggttccagaacgcctgccgcgacgggcggagcgagatcgcgttcgtggccaccggcacgaacctctccctgcagttcttccccgccagctggcagggggagcagcgccagaccccctcccgggagtacgtggacctggagcgcgaggccggcaaggtctacctcaaggccccgatgatcctgaacggggtgtgcgtgatctggaagggctggatcgacctgcagcggctcgacggcatggggtgcctggagttcgacgaggagcgcgcgcagcaggaggacgccctggcccagcaggccttcgaggaggcgcggcgccggacccgcgagttcgaggaccgggaccgcagccaccgggaggagatggaggtgcacgagctggagaagtccaagcgcgccctcgagacccagatggaggagatgaagacccagctggaggagctggaggacgagctccaggccacggaggacgcgaagctgcggctggaggtcaacatgcaggccctcaagggccagttcgagcgcgacctgcaggcccgggacgagcagaacgaggagaagcgccggcagctgcagcgccagctccacgagtacgagaccgagctggaggacgagcggaagcagcgcgccctggccgcggccgccaagaagaagctcgagggggacctgaaggacctggagctccaggccgacagcgcgatcaagggccgggaggaggccatcaagcagctgcgcaagctgcaggcccagatgaaggacttccagcgggagctcgaggacgcccgcgccagccgggacgagatcttcgcgaccgccaaggagaacgagaagaaggccaagtccctggaggccgacctgatgcagctccaggaggacctggccgcggccgagcgcgcccggaagcaggccgacctggagaaggaggagctcgccgaggagctggcgagctccctgagcgggcgcaacgccctccaggacgagaagcggcgcctggaggcccggatcgcccagctggaggaggagctcgaggaggagcagggcaacatggaggccatgtccgaccgcgtgcggaaggcgacccagcaggccgagcagctgagcaacgagctggccacggagcgctccaccgcccagaagaacgagagcgcgcgccagcagctcgagcggcagaacaaggagctgcgctccaagctgcacgagatggagggggccgtgaagtccaagttcaagagcaccatcgccgccctcgaggccaagatcgcgcagctggaggagcaggtcgagcaggaggcccgggagaagcaggccgccaccaagagcctgaagcagaaggacaagaagctcaaggagatcctgctccaggtggaggacgagcgcaagatggccgagcagtacaaggagcaggcggagaagggcaacgcccgggtgaagcagctgaagcgccagctggaggaggccgaggaggagtcccagcggatcaacgccaaccgccggaagctgcagcgcgagctcgacgaggccacggagagcaacgaggcgatgggccgggaggtcaacgccctgaagtccaagctgcgccgggggaacgagaccagcttcgtgccctcccgccggagcggcgggcgccgggtgatcgagaacgccgacggcagcgaggaggagaccgacacccgcgacgccgacttcaacgggacgaaggcgtccgagtgatgatgaggactagtccctgttcccagagcccacttttttttctttttttgaaataaaatagcctgtctttcagatctaaaaaaaaaaaaaaaaaaaaaaaaaaaaaaaaaaaaaaaaaaaaaaaaaaaaaaaaaaaaaaaaaaaaaaaaaaaaaaaaaaaaaaaaaaaaaaaaaaaa

SEQ ID NO: 1090 - RNA, 1805 nt, synthetic construct
  misc_feature 1..1805: note = Artificial____CBFbeta(1-165)_SMMHC(1527-1877) mRNA opt1
  source 1..1805: mol_type = other RNA
aggagagtcccgcagtcggcgtccagcggctctgcttgttcgtgtgtgtgtcgttgcaggccttattcaagcttaccatgccccgcgtggtcccggaccagcggagcaagttcgagaacgaggagttcttccgcaagctgtcccgggagtgcgagatcaagtacaccggcttccgcgaccggccccacgaggagcgccaggcccggttccagaacgcctgccgcgacgggcggagcgagatcgcgttcgtggccaccggcacgaacctctccctgcagttcttccccgccagctggcagggggagcagcgccagaccccctcccgggagtacgtggacctggagcgcgaggccggcaaggtctacctcaaggccccgatgatcctgaacggggtgtgcgtgatctggaagggctggatcgacctgcagcggctcgacggcatggggtgcctggagttcgacgaggagcgcgcgcagcaggaggacgccctggcccagcaggccttcgaggaggcgcggcgccggacccgcgagttcgaggaccgggaccgcagccaccgggaggagatggaggtgcacgagctggagaagtccaagcgcgccctcgagacccagatggaggagatgaagacccagctggaggagctggaggacgagctccaggccacggaggacgcgaagctgcggctggaggtcaacatgcaggccctcaagggccagttcgagcgcgacctgcaggcccgggacgagcagaacgaggagaagcgccggcagctgcagcgccagctccacgagtacgagaccgagctggaggacgagcggaagcagcgcgccctggccgcggccgccaagaagaagctcgagggggacctgaaggacctggagctccaggccgacagcgcgatcaagggccgggaggaggccatcaagcagctgcgcaagctgcaggcccagatgaaggacttccagcgggagctcgaggacgcccgcgccagccgggacgagatcttcgcgaccgccaaggagaacgagaagaaggccaagtccctggaggccgacctgatgcagctccaggaggacctggccgcggccgagcgcgcccggaagcaggccgacctggagaaggaggagctcgccgaggagctggcgagctccctgagcgggcgcaacgccctccaggacgagaagcggcgcctggaggcccggatcgcccagctggaggaggagctcgaggaggagcagggcaacatggaggccatgtccgaccgcgtgcggaaggcgacccagcaggccgagcagctgagcaacgagctggccacggagcgctccaccgcccagaagaacgagagcgcgcgccagcagctcgagcggcagaacaaggagctgcgctccaagctgcacgagatggagggggccgtgaagtccaagttcaagagcaccatcgccgccctcgaggccaagatcgcgcagctggaggagcaggtcgagcaggaggcccgggagaagcaggccgccaccaagagcctgaagcagaaggacaagaagctcaaggagatcctgctccaggtggaggacgagcgcaagatggccgagcagtacaaggagcaggcggagaagggcaacgcctgatgatgaggactagtccctgttcccagagcccacttttttttctttttttgaaataaaatagcctgtctttcagatctaaaaaaaaaaaaaaaaaaaaaaaaaaaaaaaaaaaaaaaaaaaaaaaaaaaaaaaaaaaaaaaaaaaaaaaaaaaaaaaaaaaaaaaaaaaaaaaaaaaa

SEQ ID NO: 1091 - RNA, 866 nt, synthetic construct
  misc_feature 1..866: note = Artificial____CBFbeta(1-165)_Linker_Lifeact mRNA opt1
  source 1..866: mol_type = other RNA
aggagagtcccgcagtcggcgtccagcggctctgcttgttcgtgtgtgtgtcgttgcaggccttattcaagcttaccatgccccgcgtggtcccggaccagcggagcaagttcgagaacgaggagttcttccgcaagctgtcccgggagtgcgagatcaagtacaccggcttccgcgaccggccccacgaggagcgccaggcccggttccagaacgcctgccgcgacgggcggagcgagatcgcgttcgtggccaccggcacgaacctctccctgcagttcttccccgccagctggcagggggagcagcgccagaccccctcccgggagtacgtggacctggagcgcgaggccggcaaggtctacctcaaggccccgatgatcctgaacggggtgtgcgtgatctggaagggctggatcgacctgcagcggctcgacggcatggggtgcctggagttcgacgaggagcgcgcgcagcaggaggacgccctggcccagcaggccttcgaggaggcgcggcgccggacccgcgagttcgaggaccgggaccgcagccaccgggaggagatggagggcgggagcggcgggtccggcgggagcggcggctccgggggcgggggcgtggccgacctgatcaagaagttcgagagcatctccaaggaggagggggacccgcccgtcgccacctgatgatgaggactagtccctgttcccagagcccacttttttttctttttttgaaataaaatagcctgtctttcagatctaaaaaaaaaaaaaaaaaaaaaaaaaaaaaaaaaaaaaaaaaaaaaaaaaaaaaaaaaaaaaaaaaaaaaaaaaaaaaaaaaaaaaaaaaaaaaaaaaaaa

SEQ ID NO: 1092 - RNA, 833 nt, synthetic construct
  misc_feature 1..833: note = Artificial____CBFbeta(1-165)_HIF1alpha(549-575) mRNA opt1
  source 1..833: mol_type = other RNA
aggagagtcccgcagtcggcgtccagcggctctgcttgttcgtgtgtgtgtcgttgcaggccttattcaagcttaccatgccccgcgtggtcccggaccagcggagcaagttcgagaacgaggagttcttccgcaagctgtcccgggagtgcgagatcaagtacaccggcttccgcgaccggccccacgaggagcgccaggcccggttccagaacgcctgccgcgacgggcggagcgagatcgcgttcgtggccaccggcacgaacctctccctgcagttcttccccgccagctggcagggggagcagcgccagaccccctcccgggagtacgtggacctggagcgcgaggccggcaaggtctacctcaaggccccgatgatcctgaacggggtgtgcgtgatctggaagggctggatcgacctgcagcggctcgacggcatggggtgcctggagttcgacgaggagcgcgcgcagcaggaggacgccctggcccagcaggccttcgaggaggcgcggcgccggacccgcgagttcgaggaccgggaccgcagccaccgggaggagatggagcccttcagcacccaggacaccgacctggacctcgagatgctggccccgtacatccccatggacgacgacttccagctgcgctgatgatgaggactagtccctgttcccagagcccacttttttttctttttttgaaataaaatagcctgtctttcagatctaaaaaaaaaaaaaaaaaaaaaaaaaaaaaaaaaaaaaaaaaaaaaaaaaaaaaaaaaaaaaaaaaaaaaaaaaaaaaaaaaaaaaaaaaaaaaaaaaaaa

SEQ ID NO: 1093 - RNA, 878 nt, synthetic construct
  misc_feature 1..878: note Artificial____CBFbeta(1-165)_Linker_HIF1alpha(549-575) mRNA opt1
  source 1..878: mol_type = other RNA
aggagagtcccgcagtcggcgtccagcggctctgcttgttcgtgtgtgtgtcgttgcaggccttattcaagcttaccatgccccgcgtggtcccggaccagcggagcaagttcgagaacgaggagttcttccgcaagctgtcccgggagtgcgagatcaagtacaccggcttccgcgaccggccccacgaggagcgccaggcccggttccagaacgcctgccgcgacgggcggagcgagatcgcgttcgtggccaccggcacgaacctctccctgcagttcttccccgccagctggcagggggagcagcgccagaccccctcccgggagtacgtggacctggagcgcgaggccggcaaggtctacctcaaggccccgatgatcctgaacggggtgtgcgtgatctggaagggctggatcgacctgcagcggctcgacggcatggggtgcctggagttcgacgaggagcgcgcgcagcaggaggacgccctggcccagcaggccttcgaggaggcgcggcgccggacccgcgagttcgaggaccgggaccgcagccaccgggaggagatggagggcgggagcggcgggtccggcgggagcggcggctccgggggcgggcccttcagcacccaggacaccgacctggacctcgagatgctggccccgtacatccccatggacgacgacttccagctgcgctgatgatgaggactagtccctgttcccagagcccacttttttttctttttttgaaataaaatagcctgtctttcagatctaaaaaaaaaaaaaaaaaaaaaaaaaaaaaaaaaaaaaaaaaaaaaaaaaaaaaaaaaaaaaaaaaaaaaaaaaaaaaaaaaaaaaaaaaaaaaaaaaaaa

SEQ ID NO: 1094 - RNA, 2513 nt, synthetic construct
  misc_feature 1..2513: note = Artificial____RUNX1(1-177)_N_RUNX1T1a(31-604) mRNA opt1
  source 1..2513: mol_type = other RNA
aggagagtcccgcagtcggcgtccagcggctctgcttgttcgtgtgtgtgtcgttgcaggccttattcaagcttaccatgcgcatccccgtggacgccagcacctcccggcgcttcaccccgcccagcacggccctgtcccccggcaagatgagcgaggcgctccccctgggggccccggacgccggcgccgccctggcggggaagctccggtccggcgaccgcagcatggtcgaggtgctggccgaccaccccggggagctggtgcggaccgactcccccaacttcctctgcagcgtcctgcccacccactggcgctgcaacaagaccctgccgatcgccttcaaggtggtggccctcggcgacgtccccgacggcacgctggtgaccgtgatggcggggaacgacgagaactactccgccgagctgcggaacgccaccgccgccatgaagaaccaggtcgcgcgcttcaacgacctccggttcgtgggccgcagcgggcggggcaagtccttcaccctgacgatcaccgtgttcaccaacccgccccaggtcgccacctaccaccgcgccatcaagatcacggtggacgggccccgggagccccgcaaccggaccgagaagcacagcacgatgcccgactccccggtggacgtgaagacccagagccgcctgaccccgcccaccatgcccccgccgcccacgacccagggcgcgccccggacctccagcttcacccccacgaccctgaccaacgggacctcccacagccccacggccctcaacggcgccccctccccgcccaacgggttcagcaacggcccctccagctccagctccagctccctggccaaccagcagctgccgcccgcctgcggcgcccgccagctcagcaagctgaagcggttcctgaccaccctccagcagttcgggaacgacatctcccccgagatcggcgagcgcgtccggaccctggtgctggggctcgtgaacagcacgctgaccatcgaggagttccacagcaagctgcaggaggcgaccaacttccccctccgccccttcgtcatccccttcctgaaggccaacctgcccctcctgcagcgggagctgctccactgcgcccgcctggccaagcagaaccccgcgcagtacctggcccagcacgagcagctcctgctggacgcctccaccacgagccccgtggactccagcgagctcctgctggacgtgaacgagaacggcaagcggcgcacccccgaccggaccaaggagaacgggttcgaccgcgagccgctccactccgagcaccccagcaagcggccctgcaccatctcccccggccagcgctacagcccgaacaacggcctgtcctaccagcccaacgggctgccccacccgacgcccccgccgccccagcactaccggctcgacgacatggccatcgcccaccactaccgcgacagctaccggcacccctcccaccgcgacctgcgcgaccggaaccgccccatgggcctgcacgggacccggcaggaggagatgatcgaccaccgcctcaccgaccgggagtgggcggaggagtggaagcacctggaccacctcctgaactgcatcatggacatggtcgagaagacccgccggagcctgacggtgctgcgccggtgccaggaggccgaccgcgaggagctcaactactggatccggcgctactccgacgccgaggacctgaagaagggcggcgggagctccagctcccacagccggcagcagtcccccgtgaaccccgaccccgtcgccctggacgcccaccgcgagttcctccaccggcccgcgagcggctacgtgcccgaggagatctggaagaaggccgaggaggccgtgaacgaggtcaagcgccaggccatgaccgagctgcagaaggccgtgagcgaggcggagcggaaggcccacgacatgatcaccaccgagcgcgccaagatggagcggacggtggccgaggccaagcgccaggcggccgaggacgccctggccgtcatcaaccagcaggaggactccagcgagtcctgctggaactgcgggcgcaaggcgagcgagacctgctccggctgcaacaccgcccggtactgcgggagcttctgccagcacaaggactgggagaagcaccaccacatctgcggccagaccctgcaggcccagcagcagggcgacacgccggccgtgtccagctccgtgacccccaacagcggggccggctcccccatggacacgcccccggcggccacgccccgcagcaccacccccgggaccccctccaccatcgagaccaccccgcggtgatgatgaggactagtccctgttcccagagcccacttttttttctttttttgaaataaaatagcctgtctttcagatctaaaaaaaaaaaaaaaaaaaaaaaaaaaaaaaaaaaaaaaaaaaaaaaaaaaaaaaaaaaaaaaaaaaaaaaaaaaaaaaaaaaaaaaaaaaaaaaaaaaa

SEQ ID NO: 1095 - RNA, 1028 nt, synthetic construct
  misc_feature 1..1028: note = Artificial____RUNX1(1-241)_RUNX1T1b(short) mRNA opt1
  source 1..1028: mol_type = other RNA
aggagagtcccgcagtcggcgtccagcggctctgcttgttcgtgtgtgtgtcgttgcaggccttattcaagcttaccatgcgcatccccgtggacgccagcacctcccggcgcttcaccccgcccagcacggccctgtcccccggcaagatgagcgaggcgctccccctgggggccccggacgccggcgccgccctggcggggaagctccggtccggcgaccgcagcatggtcgaggtgctggccgaccaccccggggagctggtgcggaccgactcccccaacttcctctgcagcgtcctgcccacccactggcgctgcaacaagaccctgccgatcgccttcaaggtggtggccctcggcgacgtccccgacggcacgctggtgaccgtgatggcggggaacgacgagaactactccgccgagctgcggaacgccaccgccgccatgaagaaccaggtcgcgcgcttcaacgacctccggttcgtgggccgcagcgggcggggcaagtccttcaccctgacgatcaccgtgttcaccaacccgccccaggtcgccacctaccaccgcgccatcaagatcacggtggacgggccccgggagccccgccggcaccgccagaagctggacgaccagaccaagcccggcagcctctccttcagcgagcggctgtccgagctggagcagctccgccggaccgccatgcgcgtgagcccccaccacccggcccccacccccaacccccgggcgtccctgaaccacagcacggccttcaacccgcagccccagtcccagatgcaggaggtgggcttctgccacgtcgcccaggtggggctgaagctcctgggctgatgatgaggactagtccctgttcccagagcccacttttttttctttttttgaaataaaatagcctgtctttcagatctaaaaaaaaaaaaaaaaaaaaaaaaaaaaaaaaaaaaaaaaaaaaaaaaaaaaaaaaaaaaaaaaaaaaaaaaaaaaaaaaaaaaaaaaaaaaaaaaaaaa

SEQ ID NO: 1096 - RNA, 2732 nt, synthetic construct
  misc_feature 1..2732: note = Artificial____RUNX1(1-241)_V_RUNX1T1b(22-604) mRNA opt1
  source 1..2732: mol_type = other RNA
aggagagtcccgcagtcggcgtccagcggctctgcttgttcgtgtgtgtgtcgttgcaggccttattcaagcttaccatgcgcatccccgtggacgccagcacctcccggcgcttcaccccgcccagcacggccctgtcccccggcaagatgagcgaggcgctccccctgggggccccggacgccggcgccgccctggcggggaagctccggtccggcgaccgcagcatggtcgaggtgctggccgaccaccccggggagctggtgcggaccgactcccccaacttcctctgcagcgtcctgcccacccactggcgctgcaacaagaccctgccgatcgccttcaaggtggtggccctcggcgacgtccccgacggcacgctggtgaccgtgatggcggggaacgacgagaactactccgccgagctgcggaacgccaccgccgccatgaagaaccaggtcgcgcgcttcaacgacctccggttcgtgggccgcagcgggcggggcaagtccttcaccctgacgatcaccgtgttcaccaacccgccccaggtcgccacctaccaccgcgccatcaagatcacggtggacgggccccgggagccccgccggcaccgccagaagctggacgaccagaccaagcccggcagcctctccttcagcgagcggctgtccgagctggagcagctccgccggaccgccatgcgcgtgagcccccaccacccggcccccacccccaacccccgggcgtccctgaaccacagcacggccttcaacccgcagccccagtcccagatgcaggtggggcccgagaagcgggtgccggcgatgcccggcagccccgtggaggtcaagatccagtcccgcagctccccgcccaccatgccgcccctgccgcccatcaaccccgggggcccccggcccgtgagcttcacccccacggccctgtccaacgggatcaaccactccccgcccaccctcaacggcgcccccagcccgccccagcgcttcagcaacggccccgcctccagcacctccagcgccctgaccaaccagcagctgcccgcgacgtgcggggcccggcagctctccaagctgaagcgcttcctgaccaccctccagcagttcggcaacgacatcagccccgagatcggggagaaggtgcggaccctggtcctggccctcgtgaactccacggtgaccatcgaggagttccactgcaagctgcaggaggccaccaacttccccctgcgccccttcgtcatccccttcctcaaggcgaacctgccgctgctccagcgggagctgctgcactgcgcccgcgccgccaagcagacccccagccagtacctcgcccagcacgagcacctcctgctgaacacgtccatcgcgagccccgccgacagctccgagctgctgatggaggtgcacggcaacgggaagcggcccagcccggagcgccgggaggagaactccttcgaccgcgacaccatcgcccccgagcccccggccaagcgggtgtgcaccatcagccccgcgccccgccactcccccgccctcaccgtcccgctgatgaaccccggcggccagttccaccccacgcccccgcccctgcagcactacaccctcgaggacatcgccaccagccacctgtaccgggagcccaacaagatgctggagcaccgcgaggtgcgggaccgccaccactccctcgggctgaacggcgggtaccaggacgagctggtggaccaccggctcaccgagcgcgagtgggccgacgagtggaagcacctggaccacgccctgaactgcatcatggagatggtcgagaagacgcgccggagcatggccgtgctccgccggtgccaggagtccgaccgcgaggagctgaactactggaagcggcgctacaacgagaacaccgagctgcggaagaccggcaccgagctcgtgagccgccagcactcccccggcagcgcggactccctgagcaacgactcccagcgggagttcaacagccgcccggggacgggctacgtccccgtggagttctggaagaagaccgaggaggccgtgaacaaggtcaagatccaggccatgtccgaggtgcagaaggccgtggccgaggcggagcagaaggccttcgaggtcatcgccaccgagcgggcccgcatggagcagaccatcgcggacgtgaagcggcaggccgccgaggacgccttcctggtcatcaacgagcaggaggagagcacggagaactgctggaactgcgggcgcaaggcctccgagacctgcagcggctgcaacatcgcgcggtactgcgggagcttctgccagcacaaggactgggagcgccaccaccggctctgcggccagaacctgcacggccagtccccgcacgggcagggccgccccctgctgcccgtggggcggggcagctccgcccgcagcgccgactgctccgtgcccagccccgccctcgacaagacctccgccaccacgagccgctccagcacccccgcgtccgtcaccgccatcgacaccaacgggctgtgatgatgaggactagtccctgttcccagagcccacttttttttctttttttgaaataaaatagcctgtctttcagatctaaaaaaaaaaaaaaaaaaaaaaaaaaaaaaaaaaaaaaaaaaaaaaaaaaaaaaaaaaaaaaaaaaaaaaaaaaaaaaaaaaaaaaaaaaaaaaaaaaaa

SEQ ID NO: 1097 - RNA, 2732 nt, synthetic construct
  misc_feature 1..2732: note = Artificial____RUNX1(1-241)_I_RUNX1T1b(22-604) mRNA opt1
  source 1..2732: mol_type = other RNA
aggagagtcccgcagtcggcgtccagcggctctgcttgttcgtgtgtgtgtcgttgcaggccttattcaagcttaccatgcgcatccccgtggacgccagcacctcccggcgcttcaccccgcccagcacggccctgtcccccggcaagatgagcgaggcgctccccctgggggccccggacgccggcgccgccctggcggggaagctccggtccggcgaccgcagcatggtcgaggtgctggccgaccaccccggggagctggtgcggaccgactcccccaacttcctctgcagcgtcctgcccacccactggcgctgcaacaagaccctgccgatcgccttcaaggtggtggccctcggcgacgtccccgacggcacgctggtgaccgtgatggcggggaacgacgagaactactccgccgagctgcggaacgccaccgccgccatgaagaaccaggtcgcgcgcttcaacgacctccggttcgtgggccgcagcgggcggggcaagtccttcaccctgacgatcaccgtgttcaccaacccgccccaggtcgccacctaccaccgcgccatcaagatcacggtggacgggccccgggagccccgccggcaccgccagaagctggacgaccagaccaagcccggcagcctctccttcagcgagcggctgtccgagctggagcagctccgccggaccgccatgcgcgtgagcccccaccacccggcccccacccccaacccccgggcgtccctgaaccacagcacggccttcaacccgcagccccagtcccagatgcagatcgggcccgagaagcgggtgccggcgatgcccggcagccccgtggaggtcaagatccagtcccgcagctccccgcccaccatgccgcccctgccgcccatcaaccccgggggcccccggcccgtgagcttcacccccacggccctgtccaacgggatcaaccactccccgcccaccctcaacggcgcccccagcccgccccagcgcttcagcaacggccccgcctccagcacctccagcgccctgaccaaccagcagctgcccgcgacgtgcggggcccggcagctctccaagctgaagcgcttcctgaccaccctccagcagttcggcaacgacatcagccccgagatcggggagaaggtgcggaccctggtcctggccctcgtgaactccacggtgaccatcgaggagttccactgcaagctgcaggaggccaccaacttccccctgcgccccttcgtcatccccttcctcaaggcgaacctgccgctgctccagcgggagctgctgcactgcgcccgcgccgccaagcagacccccagccagtacctcgcccagcacgagcacctcctgctgaacacgtccatcgcgagccccgccgacagctccgagctgctgatggaggtgcacggcaacgggaagcggcccagcccggagcgccgggaggagaactccttcgaccgcgacaccatcgcccccgagcccccggccaagcgggtgtgcaccatcagccccgcgccccgccactcccccgccctcaccgtcccgctgatgaaccccggcggccagttccaccccacgcccccgcccctgcagcactacaccctcgaggacatcgccaccagccacctgtaccgggagcccaacaagatgctggagcaccgcgaggtgcgggaccgccaccactccctcgggctgaacggcgggtaccaggacgagctggtggaccaccggctcaccgagcgcgagtgggccgacgagtggaagcacctggaccacgccctgaactgcatcatggagatggtcgagaagacgcgccggagcatggccgtgctccgccggtgccaggagtccgaccgcgaggagctgaactactggaagcggcgctacaacgagaacaccgagctgcggaagaccggcaccgagctcgtgagccgccagcactcccccggcagcgcggactccctgagcaacgactcccagcgggagttcaacagccgcccggggacgggctacgtccccgtggagttctggaagaagaccgaggaggccgtgaacaaggtcaagatccaggccatgtccgaggtgcagaaggccgtggccgaggcggagcagaaggccttcgaggtcatcgccaccgagcgggcccgcatggagcagaccatcgcggacgtgaagcggcaggccgccgaggacgccttcctggtcatcaacgagcaggaggagagcacggagaactgctggaactgcgggcgcaaggcctccgagacctgcagcggctgcaacatcgcgcggtactgcgggagcttctgccagcacaaggactgggagcgccaccaccggctctgcggccagaacctgcacggccagtccccgcacgggcagggccgccccctgctgcccgtggggcggggcagctccgcccgcagcgccgactgctccgtgcccagccccgccctcgacaagacctccgccaccacgagccgctccagcacccccgcgtccgtcaccgccatcgacaccaacgggctgtgatgatgaggactagtccctgttcccagagcccacttttttttctttttttgaaataaaatagcctgtctttcagatctaaaaaaaaaaaaaaaaaaaaaaaaaaaaaaaaaaaaaaaaaaaaaaaaaaaaaaaaaaaaaaaaaaaaaaaaaaaaaaaaaaaaaaaaaaaaaaaaaaaa

SEQ ID NO: 1098 - RNA, 1616 nt, synthetic construct
  misc_feature 1..1616: note = Homo sapiens__Q01196-1__RUNX1(K83E_R174Q) mRNA opt1
  source 1..1616: mol_type = other RNA
aggagagtcccgcagtcggcgtccagcggctctgcttgttcgtgtgtgtgtcgttgcaggccttattcaagcttaccatgcgcatccccgtggacgccagcacctcccggcgcttcaccccgcccagcacggccctgtcccccggcaagatgagcgaggcgctccccctgggggccccggacgccggcgccgccctggcggggaagctccggtccggcgaccgcagcatggtcgaggtgctggccgaccaccccggggagctggtgcggaccgactcccccaacttcctctgcagcgtcctgcccacccactggcgctgcaacgagaccctgccgatcgccttcaaggtggtggccctcggcgacgtccccgacggcacgctggtgaccgtgatggcggggaacgacgagaactactccgccgagctgcggaacgccaccgccgccatgaagaaccaggtcgcgcgcttcaacgacctccggttcgtgggccgcagcgggcggggcaagtccttcaccctgacgatcaccgtgttcaccaacccgccccaggtcgccacctaccaccgcgccatcaagatcacggtggacgggccccaggagccccggcgccaccggcagaagctggacgaccagaccaagcccggcagcctctccttcagcgagcgcctgtccgagctggagcagctccggcgcaccgccatgcgggtgagcccccaccacccggcccccacccccaacccccgcgcgtccctgaaccacagcacggccttcaacccgcagccccagtcccagatgcaggacacccggcagatccagcccagcccgccctggagctacgaccagtcctaccagtacctgggcagcatcgcctcccccagcgtccaccccgccacccccatctccccggggcgcgccagcggcatgaccacgctctccgcggagctgagctcccgcctgagcaccgcccccgacctcaccgccttctccgacccccggcagttcccggccctgcccagcatctccgacccccgcatgcactaccccggggccttcacctacagcccgacgcccgtgacctccggcatcggcatcgggatgagcgcgatgggctccgccacccggtaccacacctacctgcccccgccctaccccgggagctcccaggcccagggcgggcccttccaggccagcagcccctcctaccacctctactacggcgcgagcgccggctcctaccagttcagcatggtcgggggcgagcgctccccgccccggatcctgccgccctgcacgaacgccagcaccgggtccgccctgctcaaccccagcctgcccaaccagtccgacgtggtggaggccgagggcagccactccaacagccccaccaacatggcgccctccgcccgcctggaggaggccgtgtggcggccgtactgatgatgaggactagtccctgttcccagagcccacttttttttctttttttgaaataaaatagcctgtctttcagatctaaaaaaaaaaaaaaaaaaaaaaaaaaaaaaaaaaaaaaaaaaaaaaaaaaaaaaaaaaaaaaaaaaaaaaaaaaaaaaaaaaaaaaaaaaaaaaaaaaaa

SEQ ID NO: 1099 - RNA, 2090 nt, synthetic construct
  misc_feature 1..2090: note = Homo sapiens____CBFbeta(1-165)_SMMHC(1527-1972) mRNA opt1
  source 1..2090: mol_type = other RNA
aggagagtcccgcagtcggcgtccagcggctctgcttgttcgtgtgtgtgtcgttgcaggccttattcaagcttaccatgccccgcgtggtcccggaccagcggagcaagttcgagaacgaggagttcttccgcaagctgtcccgggagtgcgagatcaagtacaccggcttccgcgaccggccccacgaggagcgccaggcccggttccagaacgcctgccgcgacgggcggagcgagatcgcgttcgtggccaccggcacgaacctctccctgcagttcttccccgccagctggcagggggagcagcgccagaccccctcccgggagtacgtggacctggagcgcgaggccggcaaggtctacctcaaggccccgatgatcctgaacggggtgtgcgtgatctggaagggctggatcgacctgcagcggctcgacggcatggggtgcctggagttcgacgaggagcgcgcgcagcaggaggacgccctggcccagcaggccttcgaggaggcgcggcgccggacccgcgagttcgaggaccgggaccgcagccaccgggaggagatggaggtccacgagctcgagaagtccaagcgcgccctggagacccagatggaggagatgaagacgcagctggaggagctcgaggacgagctgcaggccaccgaggacgccaagctgcgcctcgaggtgaacatgcaggccctgaagggccagttcgagcgggacctgcaggcgcgcgacgagcagaacgaggagaagcggcgccagctccagcggcagctgcacgagtacgagaccgagctggaggacgagcgcaagcagcgggccctcgccgccgccgcgaagaagaagctggagggggacctgaaggacctcgagctgcaggccgacagcgccatcaagggccgcgaggaggccatcaagcagctgcggaagctccaggcccagatgaaggacttccagcgcgagctggaggacgcgcgggcctcccgcgacgagatcttcgccaccgccaaggagaacgagaagaaggccaagagcctggaggcggacctcatgcagctgcaggaggacctggccgccgccgagcgggcgcgcaagcaggccgacctcgagaaggaggagctggccgaggagctggcctccagcctctccgggcggaacgccctgcaggacgagaagcgccggctggaggcgcgcatcgcccagctcgaggaggagctggaggaggagcagggcaacatggaggccatgagcgaccgggtgcgcaaggccacgcagcaggccgagcagctgtccaacgagctcgcgaccgagcgcagcaccgcccagaagaacgagtccgcccggcagcagctggagcgccagaacaaggagctgcggagcaagctccacgagatggagggcgccgtcaagtccaagttcaagagcaccatcgccgcgctggaggccaagatcgcccagctggaggagcaggtcgagcaggaggcccgcgagaagcaggcggccaccaagagcctgaagcagaaggacaagaagctcaaggagatcctgctccaggtggaggacgagcggaagatggccgagcagtacaaggagcaggccgagaaggggaacgcccgcgtgaagcagctgaagcggcagctggaggaggcggaggaggagtcccagcgcatcaacgccaaccggcgcaagctgcagcgggagctcgacgaggccacggagagcaacgaggccatgggccgcgaggtgaacgccctgaagtccaagctgcggcgcgggaacgagaccagcttcgtgccctcccggcgcagcggcggccggcgcgtcatcgagaacgcggacgggtccgaggaggagaccgacacgcgggacgccgacttcaacggcaccaaggccagcgagtgatgatgaggactagtccctgttcccagagcccacttttttttctttttttgaaataaaatagcctgtctttcagatctaaaaaaaaaaaaaaaaaaaaaaaaaaaaaaaaaaaaaaaaaaaaaaaaaaaaaaaaaaaaaaaaaaaaaaaaaaaaaaaaaaaaaaaaaaaaaaaaaaaa

SEQ ID NO: 1100 - RNA, 1805 nt, synthetic construct
  misc_feature 1..1805: note = Artificial____CBFbeta(1-165)_SMMHC(1527-1877) mRNA opt1
  source 1..1805: mol_type = other RNA
aggagagtcccgcagtcggcgtccagcggctctgcttgttcgtgtgtgtgtcgttgcaggccttattcaagcttaccatgccccgcgtggtgccggaccagcggagcaagttcgagaacgaggagttcttccgcaagctgtcccgggagtgcgagatcaagtacacgggcttccgcgaccggccccacgaggagcgccaggcccggttccagaacgcctgccgcgacgggcggagcgagatcgcgttcgtggccaccggcacgaacctgtccctgcagttcttccccgccagctggcagggggagcagcgccagaccccctcccgggagtacgtggacctggagcgcgaggccggcaaggtctacctcaaggccccgatgatcctgaacggggtgtgcgtgatctggaagggctggatcgacctgcagcggctcgacggcatggggtgcctggagttcgacgaggagcgcgcgcagcaggaggacgccctggcccagcaggccttcgaggaggcgcggcgccggacccgcgagttcgaggaccgggaccgcagccaccgggaggagatggaggtccacgagctcgagaagtccaagcgcgccctggagacccagatggaggagatgaagacgcagctggaggagctcgaggacgagctgcaggccaccgaggacgccaagctgcgcctcgaggtgaacatgcaggccctgaagggccagttcgagcgggacctgcaggcgcgcgacgagcagaacgaggagaagcggcgccagctccagcggcagctgcacgagtacgagaccgagctggaggacgagcgcaagcagcgggccctcgccgccgccgcgaagaagaagctggagggggacctgaaggacctcgagctgcaggccgacagcgccatcaagggccgcgaggaggccatcaagcagctgcggaagctccaggcccagatgaaggacttccagcgcgagctggaggacgcgcgggcctcccgcgacgagatcttcgccaccgccaaggagaacgagaagaaggccaagagcctggaggcggacctcatgcagctgcaggaggacctggccgccgccgagcgggcgcgcaagcaggccgacctcgagaaggaggagctggccgaggagctggcctccagcctctccgggcggaacgccctgcaggacgagaagcgccggctggaggcgcgcatcgcccagctcgaggaggagctggaggaggagcagggcaacatggaggccatgagcgaccgggtgcgcaaggccacgcagcaggccgagcagctgtccaacgagctcgcgaccgagcgcagcaccgcccagaagaacgagtccgcccggcagcagctggagcgccagaacaaggagctgcggagcaagctccacgagatggagggcgccgtcaagtccaagttcaagagcaccatcgccgcgctggaggccaagatcgcccagctggaggagcaggtcgagcaggaggcccgcgagaagcaggcggccaccaagagcctgaagcagaaggacaagaagctcaaggagatcctgctccaggtggaggacgagcggaagatggccgagcagtacaaggagcaggccgagaaggggaacgcctgatgatgaggactagtccctgttcccagagcccacttttttttctttttttgaaataaaatagcctgtctttcagatctaaaaaaaaaaaaaaaaaaaaaaaaaaaaaaaaaaaaaaaaaaaaaaaaaaaaaaaaaaaaaaaaaaaaaaaaaaaaaaaaaaaaaaaaaaaaaaaaaaaa

SEQ ID NO: 1101 - RNA, 866 nt, synthetic construct
  misc_feature 1..866: note = Artificial____CBFbeta(1-165)_Linker_Lifeact mRNA opt1
  source 1..866: mol_type = other RNA
aggagagtcccgcagtcggcgtccagcggctctgcttgttcgtgtgtgtgtcgttgcaggccttattcaagcttaccatgccccgcgtggtccccgaccagcggagcaagttcgagaacgaggagttcttccgcaagctgtcccgggagtgcgagatcaagtacaccggcttccgcgaccggccccacgaggagcgccaggcccggttccagaacgcctgccgcgacgggcggagcgagatcgcgttcgtggccaccggcacgaacctctccctgcagttcttccccgccagctggcagggggagcagcgccagaccccctcccgggagtacgtggacctggagcgcgaggccggcaaggtctacctcaaggccccgatgatcctgaacggggtgtgcgtgatctggaagggctggatcgacctgcagcggctcgacggcatggggtgcctggagttcgacgaggagcgcgcgcagcaggaggacgccctggcccagcaggccttcgaggaggcgcggcgccggacccgcgagttcgaggaccgggaccgcagccaccgggaggagatggagggcgggtccggcgggagcggcggctccgggggcagcgggggcggcggggtcgccgacctcatcaagaagttcgagtccatcagcaaggaggagggcgacccgcccgtggccacctgatgatgaggactagtccctgttcccagagcccacttttttttctttttttgaaataaaatagcctgtctttcagatctaaaaaaaaaaaaaaaaaaaaaaaaaaaaaaaaaaaaaaaaaaaaaaaaaaaaaaaaaaaaaaaaaaaaaaaaaaaaaaaaaaaaaaaaaaaaaaaaaaaa

SEQ ID NO: 1102 - RNA, 833 nt, synthetic construct
  misc_feature 1..833: note = Artificial____CBFbeta(1-165)_HIF1alpha(549-575) mRNA opt1
  source 1..833: mol_type = other RNA
aggagagtcccgcagtcggcgtccagcggctctgcttgttcgtgtgtgtgtcgttgcaggccttattcaagcttaccatgccccgcgtggtcccggaccagcggagcaagttcgagaacgaggagttcttccgcaagctgtcccgggagtgcgagatcaagtacaccggcttccgcgaccggccccacgaggagcgccaggcccggttccagaacgcctgccgcgacgggcggagcgagatcgcgttcgtggccaccggcacgaacctctccctgcagttcttccccgccagctggcagggggagcagcgccagaccccctcccgggagtacgtggacctggagcgcgaggccggcaaggtctacctcaaggccccgatgatcctgaacggggtgtgcgtgatctggaagggctggatcgacctgcagcggctcgacggcatggggtgcctggagttcgacgaggagcgcgcgcagcaggaggacgccctggcccagcaggccttcgaggaggcgcggcgccggacccgcgagttcgaggaccgggaccgcagccaccgggaggagatggagcccttctccacccaggacacggacctcgacctggagatgctggccccctacatccccatggacgacgacttccagctccgctgatgatgaggactagtccctgttcccagagcccacttttttttctttttttgaaataaaatagcctgtctttcagatctaaaaaaaaaaaaaaaaaaaaaaaaaaaaaaaaaaaaaaaaaaaaaaaaaaaaaaaaaaaaaaaaaaaaaaaaaaaaaaaaaaaaaaaaaaaaaaaaaaaa

SEQ ID NO: 1103 - RNA, 878 nt, synthetic construct
  misc_feature 1..878: note Artificial____CBFbeta(1-165)_Linker_HIF1alpha(549-575) mRNA opt1
  source 1..878: mol_type = other RNA
aggagagtcccgcagtcggcgtccagcggctctgcttgttcgtgtgtgtgtcgttgcaggccttattcaagcttaccatgccccgcgtggtcccggaccagcggagcaagttcgagaacgaggagttcttccgcaagctgtcccgggagtgcgagatcaagtacaccggcttccgcgaccggccccacgaggagcgccaggcccggttccagaacgcctgccgcgacgggcggagcgagatcgcgttcgtggccaccggcacgaacctctccctgcagttcttccccgccagctggcagggggagcagcgccagaccccctcccgggagtacgtggacctggagcgcgaggccggcaaggtctacctcaaggccccgatgatcctgaacggggtgtgcgtgatctggaagggctggatcgacctgcagcggctcgacggcatggggtgcctggagttcgacgaggagcgcgcgcagcaggaggacgccctggcccagcaggccttcgaggaggcgcggcgccggacccgcgagttcgaggaccgggaccgcagccaccgggaggagatggagggcgggtccggcgggagcggcggctccgggggcagcgggggcggccccttctccacccaggacacggacctcgacctggagatgctggccccctacatccccatggacgacgacttccagctccgctgatgatgaggactagtccctgttcccagagcccacttttttttctttttttgaaataaaatagcctgtctttcagatctaaaaaaaaaaaaaaaaaaaaaaaaaaaaaaaaaaaaaaaaaaaaaaaaaaaaaaaaaaaaaaaaaaaaaaaaaaaaaaaaaaaaaaaaaaaaaaaaaaaa

SEQ ID NO: 1104 - RNA, 2513 nt, synthetic construct
  misc_feature 1..2513: note = Artificial____RUNX1(1-177)_N_RUNX1T1a(31-604) mRNA opt1
  source 1..2513: mol_type = other RNA
aggagagtcccgcagtcggcgtccagcggctctgcttgttcgtgtgtgtgtcgttgcaggccttattcaagcttaccatgcgcatccccgtggacgccagcacctcccggcgcttcaccccgcccagcacggccctgtcccccggcaagatgagcgaggcgctccccctgggggccccggacgccggcgccgccctggcggggaagctccggtccggcgaccgcagcatggtcgaggtgctggccgaccaccccggggagctggtgcggaccgactcccccaacttcctctgcagcgtcctgcccacccactggcgctgcaacaagaccctgccgatcgccttcaaggtggtggccctcggcgacgtccccgacggcacgctggtgaccgtgatggcggggaacgacgagaactactccgccgagctgcggaacgccaccgccgccatgaagaaccaggtcgcgcgcttcaacgacctccggttcgtgggccgcagcgggcggggcaagtccttcaccctgacgatcaccgtgttcaccaaccccccccaggtcgccacctaccaccgcgccatcaagatcacggtggacgggccgcgggagccccgcaaccggaccgagaagcacagcaccatgcccgactcccccgtggacgtcaagacccagagccgcctgacgccgcccaccatgccccccccgcccaccacccagggcgccccccggacgtccagcttcacccccaccaccctcacgaacggcacctcccacagcccgaccgccctgaacggggcgccctccccccccaacggcttcagcaacgggccgagctccagctccagctccagcctggccaaccagcagctcccccccgcctgcggcgcccgccagctgtccaagctgaagcggttcctcaccacgctgcagcagttcggcaacgacatcagcccggagatcggggagcgcgtgcggaccctggtgctcggcctggtcaactccaccctgaccatcgaggagttccacagcaagctccaggaggccacgaacttccccctgcgccccttcgtgatccccttcctgaaggcgaacctcccgctgctgcagcgcgagctcctgcactgcgcccggctggccaagcagaaccccgcccagtacctcgcccagcacgagcagctgctgctcgacgcgtccaccaccagccccgtggactccagcgagctgctgctcgacgtcaacgagaacgggaagcgccggacccccgaccgcacgaaggagaacggcttcgaccgggagccgctgcactccgagcaccccagcaagcgcccctgcaccatctcccccgggcagcggtacagcccgaacaacggcctgtcctaccagcccaacggcctcccccaccccaccccgccccccccccagcactaccgcctggacgacatggccatcgcccaccactaccgggacagctaccgccacccgagccaccgggacctgcgcgaccggaaccgccccatggggctgcacggcacccggcaggaggagatgatcgaccaccgcctcaccgaccgggagtgggccgaggagtggaagcacctggaccacctgctcaactgcatcatggacatggtggagaagacgcgccggtccctgaccgtgctgcgccgctgccaggaggcggaccgggaggagctcaactactggatccgccggtacagcgacgccgaggacctgaagaaggggggcgggtccagctccagccactcccgccagcagagccccgtcaaccccgacccggtggccctggacgcccaccgggagttcctccaccgccccgcctccggctacgtccccgaggagatctggaagaaggcggaggaggccgtgaacgaggtgaagcggcaggccatgaccgagctgcagaaggccgtcagcgaggccgagcgcaaggcgcacgacatgatcaccacggagcgggccaagatggagcgcaccgtggccgaggccaagcggcaggccgcggaggacgccctggccgtgatcaaccagcaggaggactccagcgagtcctgctggaactgcggccgcaaggccagcgagacctgctccgggtgcaacaccgcgcggtactgcggcagcttctgccagcacaaggactgggagaagcaccaccacatctgcgggcagacgctccaggcccagcagcagggcgacaccccggccgtctccagcagcgtgacccccaactccggggccggcagccccatggacacccccccggccgcgacgccccgctccaccacccccggcacccccagcacgatcgagaccaccccgcggtgatgatgaggactagtccctgttcccagagcccacttttttttctttttttgaaataaaatagcctgtctttcagatctaaaaaaaaaaaaaaaaaaaaaaaaaaaaaaaaaaaaaaaaaaaaaaaaaaaaaaaaaaaaaaaaaaaaaaaaaaaaaaaaaaaaaaaaaaaaaaaaaaaa

SEQ ID NO: 1105 - RNA, 1028 nt, synthetic construct
  misc_feature 1..1028: note = Artificial____RUNX1(1-241)_RUNX1T1b(short) mRNA opt1
  source 1..1028: mol_type = other RNA
aggagagtcccgcagtcggcgtccagcggctctgcttgttcgtgtgtgtgtcgttgcaggccttattcaagcttaccatgcgcatccccgtggacgccagcacctcccggcgcttcaccccgcccagcacggccctgtcccccggcaagatgagcgaggcgctccccctgggggccccggacgccggcgccgccctggcggggaagctccggtccggcgaccgcagcatggtcgaggtgctggccgaccaccccggggagctggtgcggaccgactcccccaacttcctctgcagcgtcctgcccacccactggcgctgcaacaagaccctgccgatcgccttcaaggtggtggccctcggcgacgtccccgacggcacgctggtgaccgtgatggcggggaacgacgagaactactccgccgagctgcggaacgccaccgccgccatgaagaaccaggtcgcgcgcttcaacgacctccggttcgtgggccgcagcgggcggggcaagtccttcaccctgacgatcaccgtgttcaccaacccgccccaggtcgccacctaccaccgcgccatcaagatcacggtggacgggccccgggagccccgccggcaccgccagaagctggacgaccagaccaagcccggcagcctctccttcagcgagcggctgtccgagctggagcagctccgccggaccgccatgcgcgtgagcccccaccacccggcccccacccccaacccccgggcgtccctgaaccacagcacggccttcaacccgcagccccagtcccagatgcaggaggtcggcttctgccacgtggcccaggtggggctgaagctcctgggctgatgatgaggactagtccctgttcccagagcccacttttttttctttttttgaaataaaatagcctgtctttcagatctaaaaaaaaaaaaaaaaaaaaaaaaaaaaaaaaaaaaaaaaaaaaaaaaaaaaaaaaaaaaaaaaaaaaaaaaaaaaaaaaaaaaaaaaaaaaaaaaaaaa

SEQ ID NO: 1106 - RNA, 2732 nt, synthetic construct
  misc_feature 1..2732: note = Artificial____RUNX1(1-241)_V_RUNX1T1b(22-604) mRNA opt1
  source 1..2732: mol_type = other RNA
aggagagtcccgcagtcggcgtccagcggctctgcttgttcgtgtgtgtgtcgttgcaggccttattcaagcttaccatgcgcatccccgtggacgccagcacctcccggcgcttcaccccgcccagcacggccctgtcccccggcaagatgagcgaggcgctccccctgggggccccggacgccggcgccgccctggcggggaagctccggtccggcgaccgcagcatggtcgaggtgctggccgaccaccccggggagctggtgcggaccgactcccccaacttcctctgcagcgtcctgcccacccactggcgctgcaacaagaccctgccgatcgccttcaaggtggtggccctcggcgacgtccccgacggcacgctggtgaccgtgatggcggggaacgacgagaactactccgccgagctgcggaacgccaccgccgccatgaagaaccaggtcgcgcgcttcaacgacctccggttcgtgggccgcagcgggcggggcaagtccttcaccctgacgatcaccgtgttcaccaacccgccccaggtcgccacctaccaccgcgccatcaagatcacggtggacgggccccgggagccccgccggcaccgccagaagctggacgaccagaccaagcccggcagcctctccttcagcgagcggctgtccgagctggagcagctccgccggaccgccatgcgcgtgagcccccaccacccggcccccacccccaacccccgggcgtccctgaaccacagcacggccttcaacccgcagccccagtcccagatgcaggtcggccccgagaagcgcgtgcccgccatgccggggagccccgtggaggtcaagatccagagccgctccagcccgcccaccatgccgcccctgcccccgatcaaccccggcgggccccggcccgtgtccttcacccccaccgccctcagcaacggcatcaaccactccccgcccacgctgaacggcgcccccagcccgccccagcgcttctccaacgggcccgcgagctccaccagctccgccctgaccaaccagcagctccccgcgacctgcggcgcccggcagctgagcaagctgaagcgcttcctcacgaccctgcagcagttcgggaacgacatctcccccgagatcggcgagaaggtgcggaccctggtcctcgccctggtgaacagcaccgtgacgatcgaggagttccactgcaagctgcaggaggccaccaacttccccctccgccccttcgtcatccccttcctgaaggccaacctgccgctcctgcagcgggagctgctccactgcgcccgcgccgcgaagcagaccccctcccagtacctggcccagcacgagcacctcctgctgaacaccagcatcgcctcccccgccgacagctccgagctgctcatggaggtgcacgggaacggcaagcggcccagcccggagcgccgggaggagaacagcttcgaccgcgacacgatcgcccccgagccgcccgcgaagcgggtctgcaccatctcccccgcgccccgccacagccccgccctgaccgtgccgctgatgaaccccggcgggcagttccaccccacgcccccgcccctgcagcactacaccctcgaggacatcgccacctcccacctgtaccgggagcccaacaagatgctggagcaccgcgaggtgcgggaccgccaccacagcctcggcctgaacgggggctaccaggacgagctggtcgaccaccggctcaccgagcgcgagtgggccgacgagtggaagcacctggaccacgccctgaactgcatcatggagatggtggagaagacccgccggtccatggccgtgctccgccggtgccaggagagcgaccgcgaggagctgaactactggaagcggcgctacaacgagaacaccgagctgcggaagacggggaccgagctcgtctcccgccagcacagccccggctccgccgacagcctgtccaacgacagccagcgggagttcaactcccgcccgggcaccgggtacgtgcccgtggagttctggaagaagaccgaggaggccgtcaacaaggtgaagatccaggccatgagcgaggtgcagaaggcggtcgccgaggccgagcagaaggccttcgaggtgatcgcgacggagcgggcccgcatggagcagaccatcgccgacgtgaagcggcaggccgccgaggacgcgttcctggtcatcaacgagcaggaggagtccaccgagaactgctggaactgcggccgcaaggccagcgagacctgctccgggtgcaacatcgcccggtactgcggcagcttctgccagcacaaggactgggagcgccaccaccggctctgcgggcagaacctgcacggccagagcccccacggccaggggcgccccctgctcccggtgggccgggggtccagcgcccgctccgccgactgcagcgtgccctcccccgcgctggacaagacgagcgccaccacctcccggagctccacccccgccagcgtcacggccatcgacaccaacggcctgtgatgatgaggactagtccctgttcccagagcccacttttttttctttttttgaaataaaatagcctgtctttcagatctaaaaaaaaaaaaaaaaaaaaaaaaaaaaaaaaaaaaaaaaaaaaaaaaaaaaaaaaaaaaaaaaaaaaaaaaaaaaaaaaaaaaaaaaaaaaaaaaaaaa

SEQ ID NO: 1107 - RNA, 2732 nt, synthetic construct
  misc_feature 1..2732: note = Artificial____RUNX1(1-241)_I_RUNX1T1b(22-604) mRNA opt1
  source 1..2732: mol_type = other RNA
aggagagtcccgcagtcggcgtccagcggctctgcttgttcgtgtgtgtgtcgttgcaggccttattcaagcttaccatgcgcatccccgtggacgccagcacctcccggcgcttcaccccgcccagcacggccctgtcccccggcaagatgagcgaggcgctccccctgggggccccggacgccggcgccgccctggcggggaagctccggtccggcgaccgcagcatggtcgaggtgctggccgaccaccccggggagctggtgcggaccgactcccccaacttcctctgcagcgtcctgcccacccactggcgctgcaacaagaccctgccgatcgccttcaaggtggtggccctcggcgacgtccccgacggcacgctggtgaccgtgatggcggggaacgacgagaactactccgccgagctgcggaacgccaccgccgccatgaagaaccaggtcgcgcgcttcaacgacctccggttcgtgggccgcagcgggcggggcaagtccttcaccctgacgatcaccgtgttcaccaacccgccccaggtcgccacctaccaccgcgccatcaagatcacggtggacgggccccgggagccccgccggcaccgccagaagctggacgaccagaccaagcccggcagcctctccttcagcgagcggctgtccgagctggagcagctccgccggaccgccatgcgcgtgagcccccaccacccggcccccacccccaacccccgggcgtccctgaaccacagcacggccttcaacccgcagccccagtcccagatgcagatcggccccgagaagcgcgtccccgccatgccggggagccccgtggaggtgaagatccagagccgctccagcccgcccaccatgccgcccctgcccccgatcaaccccggcgggccccggcccgtctccttcacccccaccgccctcagcaacggcatcaaccactccccgcccacgctgaacggcgcccccagcccgccccagcgcttctccaacgggcccgcgagctccaccagctccgccctgaccaaccagcagctccccgcgacctgcggcgcccggcagctgagcaagctgaagcgcttcctcacgaccctgcagcagttcgggaacgacatctcccccgagatcggcgagaaggtgcggaccctggtgctcgccctggtcaacagcaccgtgacgatcgaggagttccactgcaagctgcaggaggccaccaacttccccctccgccccttcgtgatccccttcctgaaggccaacctgccgctcctgcagcgggagctgctccactgcgcccgcgccgcgaagcagaccccctcccagtacctggcccagcacgagcacctcctgctgaacaccagcatcgcctcccccgccgacagctccgagctgctcatggaggtccacgggaacggcaagcggcccagcccggagcgccgggaggagaacagcttcgaccgcgacacgatcgcccccgagccgcccgcgaagcgggtgtgcaccatctcccccgcgccccgccacagccccgccctgaccgtcccgctgatgaaccccggcgggcagttccaccccacgcccccgcccctgcagcactacaccctcgaggacatcgccacctcccacctgtaccgggagcccaacaagatgctggagcaccgcgaggtgcgggaccgccaccacagcctcggcctgaacgggggctaccaggacgagctggtggaccaccggctcaccgagcgcgagtgggccgacgagtggaagcacctggaccacgccctgaactgcatcatggagatggtcgagaagacccgccggtccatggccgtgctccgccggtgccaggagagcgaccgcgaggagctgaactactggaagcggcgctacaacgagaacaccgagctgcggaagacggggaccgagctcgtgtcccgccagcacagccccggctccgccgacagcctgtccaacgacagccagcgggagttcaactcccgcccgggcaccgggtacgtccccgtggagttctggaagaagaccgaggaggccgtgaacaaggtcaagatccaggccatgagcgaggtgcagaaggcggtggccgaggccgagcagaaggccttcgaggtcatcgcgacggagcgggcccgcatggagcagaccatcgccgacgtgaagcggcaggccgccgaggacgcgttcctggtgatcaacgagcaggaggagtccaccgagaactgctggaactgcggccgcaaggccagcgagacctgctccgggtgcaacatcgcccggtactgcggcagcttctgccagcacaaggactgggagcgccaccaccggctctgcgggcagaacctgcacggccagagcccccacggccaggggcgccccctgctcccggtcggccgggggtccagcgcccgctccgccgactgcagcgtgccctcccccgcgctggacaagacgagcgccaccacctcccggagctccacccccgccagcgtgacggccatcgacaccaacggcctgtgatgatgaggactagtccctgttcccagagcccacttttttttctttttttgaaataaaatagcctgtctttcagatctaaaaaaaaaaaaaaaaaaaaaaaaaaaaaaaaaaaaaaaaaaaaaaaaaaaaaaaaaaaaaaaaaaaaaaaaaaaaaaaaaaaaaaaaaaaaaaaaaaaa

SEQ ID NO: 1108 - RNA, 1616 nt, synthetic construct
  misc_feature 1..1616: note = Homo sapiens__Q01196-1__RUNX1(K83E_R174Q) mRNA opt3
  source 1..1616: mol_type = other RNA
aggagagtcccgcagtcggcgtccagcggctctgcttgttcgtgtgtgtgtcgttgcaggccttattcaagcttaccatgagaatccccgtggatgccagcaccagcagaagattcacccctcctagcaccgctctgagccctggcaagatgtctgaagctctgcctctgggagcacctgatgctggtgcagctctggccggaaaactgagaagcggcgacagatccatggtggaagtgctggctgatcaccccggcgaacttgtgcggacagacagccctaatttcctgtgcagcgtgctgcctacacactggcggtgcaatgagacactgcctatcgccttcaaggtggtggccctgggagatgtgcctgatggcacactggttacagtgatggccggcaacgacgagaactacagcgccgagctgagaaatgccaccgccgccatgaagaaccaggtggccagattcaacgacctgagattcgtgggcagaagcggcaggggcaagagctttaccctgaccatcaccgtgttcaccaatcctccacaggtggcaacctaccaccgggccatcaagatcacagtggacggccctcaagagcccagacggcacagacagaaactggacgaccagaccaagcctggcagcctgagctttagcgagagactgagcgagctggaacagctgagaagaaccgccatgcgggtgtccccacatcaccctgctcctacacctaatcctcgggccagcctgaatcacagcaccgcctttaatccccagcctcagagccagatgcaggacaccagacagattcagccttctccaccttggagctacgaccagagctaccagtacctgggctctatcgcctctcctagcgtgcaccctgccacacctattagtcctggcagagccagcggcatgacaacactgtctgccgagctgtccagcagactgagcacagcccctgatctgaccgccttcagcgaccctagacagttccctgctctgcccagcatctctgaccccagaatgcattaccctggcgccttcacatacagccccacacctgtgacaagcggcatcggcattggcatgtctgccatgggaagcgccaccagataccacacctacctgcctccaccttatcctggcagctctcaggctcaaggcggcccttttcaggccagctctccttcctaccacctgtactatggcgccagcgccggctcctaccagttttctatggttggaggcgagcggagccctcctagaatcctgcctccttgtaccaacgccagcacaggatctgccctgctgaatcccagcctgcctaatcagagcgacgtggtggaagccgagggcagccatagcaacagccctaccaatatggcccctagcgccagactggaagaggccgtttggaggccttactgatgatgaggactagtccctgttcccagagcccacttttttttctttttttgaaataaaatagcctgtctttcagatctaaaaaaaaaaaaaaaaaaaaaaaaaaaaaaaaaaaaaaaaaaaaaaaaaaaaaaaaaaaaaaaaaaaaaaaaaaaaaaaaaaaaaaaaaaaaaaaaaaaa

SEQ ID NO: 1109 - RNA, 2090 nt, synthetic construct
  misc_feature 1..2090: note = Homo sapiens____CBFbeta(1-165)_SMMHC(1527-1972) mRNA opt3
  source 1..2090: mol_type = other RNA
aggagagtcccgcagtcggcgtccagcggctctgcttgttcgtgtgtgtgtcgttgcaggccttattcaagcttaccatgcctagagtggtgcccgaccagagaagcaagttcgagaacgaagagttctttcggaagctgagcagagagtgcgagatcaagtacaccggcttccgggacagaccccacgaagaaagacaggccagattccagaacgcctgcagagatggcagatccgagatcgcctttgtggccaccggcaccaatctgagcctgcagttctttccagcctcctggcagggcgagcagagacaaacacccagcagagaatacgtggacctggaacgcgaggccggcaaggtgtacctgaaggcccctatgatcctgaacggcgtgtgcgtgatctggaaaggctggatcgatctgcagcggctggatggcatgggctgcctggaatttgacgaggaaagagcccagcaagaggacgcccttgctcagcaggcctttgaggaagccagaaggcggaccagagagttcgaggacagagacagatcccaccgggaagagatggaagtgcacgagctggaaaagagcaagagagccctggaaacccagatggaagaaatgaagacccagctcgaggaactcgaggacgagctgcaggccacagaggatgccaagctgagactggaagtgaacatgcaggccctgaagggccagttcgagagagatctgcaggctagggacgagcagaacgaggaaaagcggagacagctgcagaggcagctgcacgagtacgagacagagctggaagatgagcggaagcagagagcactggccgctgccgccaagaagaaactggaaggcgacctgaaggatctggaactccaggccgacagcgccatcaagggaagagaagaggccatcaagcagctgcggaagctgcaagcccagatgaaggacttccagcgcgagttggaagatgccagagccagcagggatgagatcttcgccaccgccaaagagaacgagaagaaggccaagagcctggaagccgatctgatgcagctccaagaggatctggctgccgccgagagagccagaaaacaggccgacctggaaaaagaggaactggccgaagaactggccagcagcctgtctggcagaaacgctctgcaggacgagaagagaaggctggaagccaggatcgcccagttggaggaagaactcgaagaggaacagggcaacatggaagccatgagcgacagagtgcggaaggccacacagcaggctgagcagctgagcaatgagctggccaccgagagaagcacagcccagaagaatgagagcgccaggcagcagctcgagcggcagaacaaagagctgagaagcaaactgcacgaaatggaaggggccgtgaagtccaagttcaagagcacaatcgccgctctcgaggccaagatcgctcagctcgaagaacaggtggaacaagaggcccgggaaaagcaggccgccacaaagtctctgaagcagaaggacaagaagctgaaagaaatcctgctgcaggtcgaggatgagagaaagatggccgagcagtacaaagaacaggctgagaagggcaacgccagagtgaagcagctgaaacggcaactggaagaggccgaggaagagtcccagagaatcaacgccaacagacggaaactgcagagagagctggacgaagccaccgagtccaatgaggccatgggcagagaagtgaacgccctgaagtctaagctgcggagaggcaacgaaaccagcttcgtgcccagcagaagatccggcggcagaagagtgatcgagaacgccgatggctctgaggaagaaaccgacaccagagatgccgacttcaacggcacaaaggccagcgagtaatgatgaggactagtccctgttcccagagcccacttttttttctttttttgaaataaaatagcctgtctttcagatctaaaaaaaaaaaaaaaaaaaaaaaaaaaaaaaaaaaaaaaaaaaaaaaaaaaaaaaaaaaaaaaaaaaaaaaaaaaaaaaaaaaaaaaaaaaaaaaaaaaa

SEQ ID NO: 1110 - RNA, 1805 nt, synthetic construct
  misc_feature 1..1805: note = Artificial____CBFbeta(1-165)_SMMHC(1527-1877) mRNA opt3
  source 1..1805: mol_type = other RNA
aggagagtcccgcagtcggcgtccagcggctctgcttgttcgtgtgtgtgtcgttgcaggccttattcaagcttaccatgcctagagtggtgcccgaccagagaagcaagttcgagaacgaagagttctttcggaagctgagcagagagtgcgagatcaagtacaccggcttccgggacagaccccacgaagaaagacaggccagattccagaacgcctgcagagatggcagatccgagatcgcctttgtggccaccggcaccaatctgagcctgcagttctttccagcctcctggcagggcgagcagagacaaacacccagcagagaatacgtggacctggaacgcgaggccggcaaggtgtacctgaaggcccctatgatcctgaacggcgtgtgcgtgatctggaaaggctggatcgatctgcagcggctggatggcatgggctgcctggaatttgacgaggaaagagcccagcaagaggacgcccttgctcagcaggcctttgaggaagccagaaggcggaccagagagttcgaggacagagacagatcccaccgggaagagatggaagtgcacgagctggaaaagagcaagagagccctggaaacccagatggaagaaatgaagacccagctcgaggaactcgaggacgagctgcaggccacagaggatgccaagctgagactggaagtgaacatgcaggccctgaagggccagttcgagagagatctgcaggctagggacgagcagaacgaggaaaagcggagacagctgcagaggcagctgcacgagtacgagacagagctggaagatgagcggaagcagagagcactggccgctgccgccaagaagaaactggaaggcgacctgaaggatctggaactccaggccgacagcgccatcaagggaagagaagaggccatcaagcagctgcggaagctgcaagcccagatgaaggacttccagcgcgagttggaagatgccagagccagcagggatgagatcttcgccaccgccaaagagaacgagaagaaggccaagagcctggaagccgatctgatgcagctccaagaggatctggctgccgccgagagagccagaaaacaggccgacctggaaaaagaggaactggccgaagaactggccagcagcctgtctggcagaaacgctctgcaggacgagaagagaaggctggaagccaggatcgcccagttggaggaagaactcgaagaggaacagggcaacatggaagccatgagcgacagagtgcggaaggccacacagcaggctgagcagctgagcaatgagctggccaccgagagaagcacagcccagaagaatgagagcgccaggcagcagctcgagcggcagaacaaagagctgagaagcaaactgcacgaaatggaaggggccgtgaagtccaagttcaagagcacaatcgccgctctcgaggccaagatcgctcagctcgaagaacaggtggaacaagaggcccgggaaaagcaggccgccacaaagtctctgaagcagaaggacaagaagctgaaagaaatcctgctgcaggtcgaggatgagagaaagatggccgagcagtacaaagaacaggctgagaagggcaacgcctgatgatgaggactagtccctgttcccagagcccacttttttttctttttttgaaataaaatagcctgtctttcagatctaaaaaaaaaaaaaaaaaaaaaaaaaaaaaaaaaaaaaaaaaaaaaaaaaaaaaaaaaaaaaaaaaaaaaaaaaaaaaaaaaaaaaaaaaaaaaaaaaaaa

SEQ ID NO: 1111 - RNA, 866 nt, synthetic construct
  misc_feature 1..866: note = Artificial____CBFbeta(1-165)_Linker_Lifeact mRNA opt3
  source 1..866: mol_type = other RNA
aggagagtcccgcagtcggcgtccagcggctctgcttgttcgtgtgtgtgtcgttgcaggccttattcaagcttaccatgcctagagtggtgcccgaccagagaagcaagttcgagaacgaagagttctttcggaagctgagcagagagtgcgagatcaagtacaccggcttccgggacagaccccacgaagaaagacaggccagattccagaacgcctgcagagatggcagatccgagatcgcctttgtggccaccggcaccaatctgagcctgcagttctttccagcctcctggcagggcgagcagagacaaacacccagcagagaatacgtggacctggaacgcgaggccggcaaggtgtacctgaaggcccctatgatcctgaacggcgtgtgcgtgatctggaaaggctggatcgatctgcagcggctggatggcatgggctgcctggaatttgacgaggaaagagcccagcaagaggacgcccttgctcagcaggcctttgaggaagccagaaggcggaccagagagttcgaggacagagacagatcccaccgggaagagatggaaggcggatctggtggaagcggaggtagcggaggatcaggcggaggcggagttgccgatctgatcaagaagttcgagtccatcagcaaagaagagggcgaccctccagtggccacatgatgatgaggactagtccctgttcccagagcccacttttttttctttttttgaaataaaatagcctgtctttcagatctaaaaaaaaaaaaaaaaaaaaaaaaaaaaaaaaaaaaaaaaaaaaaaaaaaaaaaaaaaaaaaaaaaaaaaaaaaaaaaaaaaaaaaaaaaaaaaaaaaaa

SEQ ID NO: 1112 - RNA, 833 nt, synthetic construct
  misc_feature 1..833: note = Artificial____CBFbeta(1-165)_HIF1alpha(549-575) mRNA opt3
  source 1..833: mol_type = other RNA
aggagagtcccgcagtcggcgtccagcggctctgcttgttcgtgtgtgtgtcgttgcaggccttattcaagcttaccatgcctagagtggtgcccgaccagagaagcaagttcgagaacgaagagttctttcggaagctgagcagagagtgcgagatcaagtacaccggcttccgggacagaccccacgaagaaagacaggccagattccagaacgcctgcagagatggcagatccgagatcgcctttgtggccaccggcaccaatctgagcctgcagttctttccagcctcctggcagggcgagcagagacaaacacccagcagagaatacgtggacctggaacgcgaggccggcaaggtgtacctgaaggcccctatgatcctgaacggcgtgtgcgtgatctggaaaggctggatcgatctgcagcggctggatggcatgggctgcctggaatttgacgaggaaagagcccagcaagaggacgcccttgctcagcaggcctttgaggaagccagaaggcggaccagagagttcgaggacagagacagatcccaccgggaagagatggaacccttcagcacccaagacaccgacctggacctcgaaatgctggccccttacatccccatggacgacgacttccagctgcggtaatgatgaggactagtccctgttcccagagcccacttttttttctttttttgaaataaaatagcctgtctttcagatctaaaaaaaaaaaaaaaaaaaaaaaaaaaaaaaaaaaaaaaaaaaaaaaaaaaaaaaaaaaaaaaaaaaaaaaaaaaaaaaaaaaaaaaaaaaaaaaaaaaa

SEQ ID NO: 1113 - RNA, 878 nt, synthetic construct
  misc_feature 1..878: note Artificial____CBFbeta(1-165)_Linker_HIF1alpha(549-575) mRNA opt3
  source 1..878: mol_type = other RNA
aggagagtcccgcagtcggcgtccagcggctctgcttgttcgtgtgtgtgtcgttgcaggccttattcaagcttaccatgcctagagtggtgcccgaccagagaagcaagttcgagaacgaagagttctttcggaagctgagcagagagtgcgagatcaagtacaccggcttccgggacagaccccacgaagaaagacaggccagattccagaacgcctgcagagatggcagatccgagatcgcctttgtggccaccggcaccaatctgagcctgcagttctttccagcctcctggcagggcgagcagagacaaacacccagcagagaatacgtggacctggaacgcgaggccggcaaggtgtacctgaaggcccctatgatcctgaacggcgtgtgcgtgatctggaaaggctggatcgatctgcagcggctggatggcatgggctgcctggaatttgacgaggaaagagcccagcaagaggacgcccttgctcagcaggcctttgaggaagccagaaggcggaccagagagttcgaggacagagacagatcccaccgggaagagatggaaggcggatctggtggaagcggaggtagcggaggatctggcggaggacctttcagcacccaagacaccgacctggacctcgaaatgctggccccttacatccccatggacgacgacttccagctgcggtaatgatgaggactagtccctgttcccagagcccacttttttttctttttttgaaataaaatagcctgtctttcagatctaaaaaaaaaaaaaaaaaaaaaaaaaaaaaaaaaaaaaaaaaaaaaaaaaaaaaaaaaaaaaaaaaaaaaaaaaaaaaaaaaaaaaaaaaaaaaaaaaaaa

SEQ ID NO: 1114 - RNA, 2513 nt, synthetic construct
  misc_feature 1..2513: note = Artificial____RUNX1(1-177)_N_RUNX1T1a(31-604) mRNA opt3
  source 1..2513: mol_type = other RNA
aggagagtcccgcagtcggcgtccagcggctctgcttgttcgtgtgtgtgtcgttgcaggccttattcaagcttaccatgagaatccccgtggatgccagcaccagcagaagattcacccctcctagcaccgctctgagccctggcaagatgtctgaagctctgcctctgggagcacctgatgctggtgcagctctggccggaaaactgagaagcggcgacagatccatggtggaagtgctggctgatcaccccggcgaacttgtgcggacagacagccctaatttcctgtgcagcgtgctgcctacacactggcggtgcaacaagacactgcctatcgccttcaaggtggtggctctgggagatgtgcctgatggcacactggtcacagtgatggccggcaacgacgagaattacagcgccgagctgagaaatgccaccgccgccatgaagaaccaggtggccagattcaacgacctgagattcgtgggcagaagcggcaggggcaagagctttaccctgaccatcaccgtgttcaccaatcctccacaggtggcaacctaccaccgggccatcaagatcaccgtggatggccctagagagccccggaacagaacagagaagcacagcaccatgcctgacagccccgtggacgtgaaaacccagagcagactgacccctccaaccatgcctcctccacctacaacacagggcgctcctagaaccagcagcttcacccctaccacactgaccaacggcacctctcacagccccacagctcttaatggcgccccttctccacctaacggcttcagcaatggcccaagcagcagcagctctagcagcctggctaatcagcagctgcctcctgcttgtggcgctagacagctgagcaagctgaagcggttcctgaccacactgcagcagttcggcaacgatatcagccccgagatcggcgagcgcgtcagaacactggttctgggcctcgtgaatagcaccctgacaatcgaagagttccacagcaagctgcaagaggccaccaactttccgctgcggcctttcgtgatcccattcctgaaggccaacctgcctctgctgcagagagaactgctccactgcgccagactggccaagcagaaccctgctcagtatctggcccagcacgagcaactgctgctggacgcctctacaacaagccctgtggatagcagcgagctgctcctggatgtgaacgagaacggcaagcggagaacccctgaccggaccaaagagaacggcttcgacagagagcctctgcacagcgagcaccccagcaaaagaccctgcacaatcagccctggccagcggtactctcccaacaacggcctgagctaccagcctaacggactgccccatcctacacctccacctccacagcactaccggctggacgatatggctatcgcccaccactaccgggacagctacagacaccctagccaccgggacctgcgggacagaaatagacctatgggcctgcacggcacccggcaagaggaaatgattgaccaccggctgaccgacagagaatgggccgaagagtggaagcacctggaccatctgctgaactgcatcatggatatggtggaaaagacccggcggagcctgaccgtgctgagaagatgtcaagaggccgatagagaggaactgaactactggatccggcggtacagcgacgccgaggatcttaagaaaggcggcggatctagcagcagccacagcagacagcagagccccgtgaatcctgatcctgtggcactggatgcccacagagaatttctgcacagacccgccagcggctacgtgccagaggaaatctggaagaaagccgaagaggccgtgaacgaagtgaagagacaggccatgaccgaactgcagaaagccgtgtctgaggccgagagaaaggcccacgatatgatcacaaccgagcgggccaagatggaaagaacagtggccgaggccaaaagacaggccgccgaagatgctctggctgtgatcaatcagcaagaggacagcagcgagtcctgctggaactgtggcagaaaggccagcgagacatgcagcggctgtaacaccgccagatattgcggcagcttctgccagcacaaggactgggagaagcaccaccacatctgcggccagacactgcaggctcagcagcaaggcgatactcctgccgtgtctagcagcgtgacccctaattctggcgccggatctcccatggatacccctccagctgccacacctagaagcacaacccctggcacacccagcaccatcgagacaacccctagatgatgatgaggactagtccctgttcccagagcccacttttttttctttttttgaaataaaatagcctgtctttcagatctaaaaaaaaaaaaaaaaaaaaaaaaaaaaaaaaaaaaaaaaaaaaaaaaaaaaaaaaaaaaaaaaaaaaaaaaaaaaaaaaaaaaaaaaaaaaaaaaaaaa

SEQ ID NO: 1115 - RNA, 1028 nt, synthetic construct
  misc_feature 1..1028: note = Artificial____RUNX1(1-241)_RUNX1T1b(short) mRNA opt3
  source 1..1028: mol_type = other RNA
aggagagtcccgcagtcggcgtccagcggctctgcttgttcgtgtgtgtgtcgttgcaggccttattcaagcttaccatgagaatccccgtggatgccagcaccagcagaagattcacccctcctagcaccgctctgagccctggcaagatgtctgaagctctgcctctgggagcacctgatgctggtgcagctctggccggaaaactgagaagcggcgacagatccatggtggaagtgctggctgatcaccccggcgaacttgtgcggacagacagccctaatttcctgtgcagcgtgctgcctacacactggcggtgcaacaagacactgcctatcgccttcaaggtggtggctctgggagatgtgcctgatggcacactggtcacagtgatggccggcaacgacgagaattacagcgccgagctgagaaatgccaccgccgccatgaagaaccaggtggccagattcaacgacctgagattcgtgggcagaagcggcaggggcaagagctttaccctgaccatcaccgtgttcaccaatcctccacaggtggcaacctaccaccgggccatcaagatcaccgtggatggccctagagagcccagacggcacagacagaaactggacgaccagaccaagcctggcagcctgagctttagcgagagactgagcgagctggaacagctgagaagaaccgccatgcgggtgtccccacatcaccctgctcctacacctaatcctcgggccagcctgaatcacagcaccgcctttaatccccagcctcagagccagatgcaagaagtgggcttctgtcacgtggcccaagtgggactgaagctgctgggataatgatgaggactagtccctgttcccagagcccacttttttttctttttttgaaataaaatagcctgtctttcagatctaaaaaaaaaaaaaaaaaaaaaaaaaaaaaaaaaaaaaaaaaaaaaaaaaaaaaaaaaaaaaaaaaaaaaaaaaaaaaaaaaaaaaaaaaaaaaaaaaaaa

SEQ ID NO: 1116 - RNA, 2732 nt, synthetic construct
  misc_feature 1..2732: note = Artificial____RUNX1(1-241)_V_RUNX1T1b(22-604) mRNA opt3
  source 1..2732: mol_type = other RNA
aggagagtcccgcagtcggcgtccagcggctctgcttgttcgtgtgtgtgtcgttgcaggccttattcaagcttaccatgagaatccccgtggatgccagcaccagcagaagattcacccctcctagcaccgctctgagccctggcaagatgtctgaagctctgcctctgggagcacctgatgctggtgcagctctggccggaaaactgagaagcggcgacagatccatggtggaagtgctggctgatcaccccggcgaacttgtgcggacagacagccctaatttcctgtgcagcgtgctgcctacacactggcggtgcaacaagacactgcctatcgccttcaaggtggtggctctgggagatgtgcctgatggcacactggtcacagtgatggccggcaacgacgagaattacagcgccgagctgagaaatgccaccgccgccatgaagaaccaggtggccagattcaacgacctgagattcgtgggcagaagcggcaggggcaagagctttaccctgaccatcaccgtgttcaccaatcctccacaggtggcaacctaccaccgggccatcaagatcaccgtggatggccctagagagcccagacggcacagacagaaactggacgaccagaccaagcctggcagcctgagctttagcgagagactgagcgagctggaacagctgagaagaaccgccatgcgggtgtccccacatcaccctgctcctacacctaatcctcgggccagcctgaatcacagcaccgcctttaatccccagcctcagagccagatgcaagtgggccctgagaaaagggtgccagccatgcctggaagccccgtggaagtgaagatccagagcagatctagccctcctaccatgcctcctctgcctccaatcaatcctggcggccctagacctgtgtccttcacacctaccgctctgtccaacggcatcaatcacagccctccaacactgaatggcgccccatctccacctcagcggttttctaatggccctgccagcagcacaagcagcgccctgacaaatcagcagctgcctgctacatgtggcgccagacagctgagcaagctgaagcggtttctgaccacactgcagcagttcggcaacgatatcagccccgagatcggcgagaaagtgcggacactggttctggccctggtcaacagcaccgtgaccatcgaagagttccactgcaagctgcaagaggccaccaactttccgctgcggcctttcgtgatcccattcctgaaggccaacctgcctctgctgcagagagagctgctgcattgcgccagagccgccaagcagacaccttctcagtatctggcccagcacgagcatctgctgctgaacacctctatcgcctctccagccgatagcagcgagctgctcatggaagtgcacggcaacggaaagaggccctctccagagcggagagaggaaaacagcttcgaccgggacacaatcgcccctgagcctccagccaagagagtgtgcacaatcagcccagctcctagacacagccccgctctgacagtgccccttatgaaccctggcggacagtttcaccccacacctccaccactccagcactacaccctggaagatatcgccaccagccacctgtaccgcgagcctaacaagatgctggaacaccgggaagtgcgcgacaggcaccattctctgggactgaacggcggctaccaggacgaactggtggatcacagactgaccgagcgcgagtgggccgatgaatggaaacacctggatcacgccctgaactgcatcatggaaatggtggaaaagacccggcggagcatggccgtcctgagaagatgtcaagagagcgacagagaggaactgaactactggaagcggaggtacaacgagaacaccgagctgcggaaaaccggcactgagctggtgtccagacagcactctcctggctctgccgatagcctgagcaacgactcccagagagagttcaacagcagacccggcacaggctacgtgcccgtggaattttggaagaaaaccgaagaggccgtgaacaaagtcaagattcaggccatgagcgaggtgcagaaagccgtggctgaggccgaacagaaagccttcgaagtgatcgccaccgagcgggccagaatggaacagacaatcgccgacgtgaagagacaggccgccgaggatgccttcctggtcatcaacgagcaagaggaaagcaccgagaactgctggaactgcggcagaaaggccagcgagacatgcagcggctgcaatatcgccagatattgcggcagcttctgccagcacaaggactgggagagacaccacagactgtgcggccagaatctgcacggacagagccctcatggacagggcagacctctgctccctgttggcagaggatctagcgccagatctgccgactgtagcgtgccatctcctgcactggataagaccagcgccaccacaagcagaagcagcacaccagcctctgtgaccgccatcgataccaacggactgtgatgatgaggactagtccctgttcccagagcccacttttttttctttttttgaaataaaatagcctgtctttcagatctaaaaaaaaaaaaaaaaaaaaaaaaaaaaaaaaaaaaaaaaaaaaaaaaaaaaaaaaaaaaaaaaaaaaaaaaaaaaaaaaaaaaaaaaaaaaaaaaaaaa

SEQ ID NO: 1117 - RNA, 2732 nt, synthetic construct
  misc_feature 1..2732: note = Artificial____RUNX1(1-241)_I_RUNX1T1b(22-604) mRNA opt3
  source 1..2732: mol_type = other RNA
aggagagtcccgcagtcggcgtccagcggctctgcttgttcgtgtgtgtgtcgttgcaggccttattcaagcttaccatgagaatccccgtggatgccagcaccagcagaagattcacccctcctagcaccgctctgagccctggcaagatgtctgaagctctgcctctgggagcacctgatgctggtgcagctctggccggaaaactgagaagcggcgacagatccatggtggaagtgctggctgatcaccccggcgaacttgtgcggacagacagccctaatttcctgtgcagcgtgctgcctacacactggcggtgcaacaagacactgcctatcgccttcaaggtggtggctctgggagatgtgcctgatggcacactggtcacagtgatggccggcaacgacgagaattacagcgccgagctgagaaatgccaccgccgccatgaagaaccaggtggccagattcaacgacctgagattcgtgggcagaagcggcaggggcaagagctttaccctgaccatcaccgtgttcaccaatcctccacaggtggcaacctaccaccgggccatcaagatcaccgtggatggccctagagagcccagacggcacagacagaaactggacgaccagaccaagcctggcagcctgagctttagcgagagactgagcgagctggaacagctgagaagaaccgccatgcgggtgtccccacatcaccctgctcctacacctaatcctcgggccagcctgaatcacagcaccgcctttaatccccagcctcagagccagatgcagatcggccctgagaaaagggtgccagccatgcctggaagccccgtggaagtgaagatccagagcagatctagccctcctaccatgcctcctctgcctccaatcaatcctggcggccctagacctgtgtccttcacacctaccgctctgtccaacggcatcaatcacagccctccaacactgaatggcgccccatctccacctcagcggttttctaatggccctgccagcagcacaagcagcgccctgacaaatcagcagctgcctgctacatgtggcgccagacagctgagcaagctgaagcggtttctgaccacactgcagcagttcggcaacgatatcagccccgagatcggcgagaaagtgcggacactggttctggccctggtcaacagcaccgtgaccatcgaagagttccactgcaagctgcaagaggccaccaactttccgctgcggcctttcgtgatcccattcctgaaggccaacctgcctctgctgcagagagagctgctgcattgcgccagagccgccaagcagacaccttctcagtatctggcccagcacgagcatctgctgctgaacacctctatcgcctctccagccgatagcagcgagctgctcatggaagtgcacggcaacggaaagaggccctctccagagcggagagaggaaaacagcttcgaccgggacacaatcgcccctgagcctccagccaagagagtgtgcacaatcagcccagctcctagacacagccccgctctgacagtgccccttatgaaccctggcggacagtttcaccccacacctccaccactccagcactacaccctggaagatatcgccaccagccacctgtaccgcgagcctaacaagatgctggaacaccgggaagtgcgcgacaggcaccattctctgggactgaacggcggctaccaggacgaactggtggatcacagactgaccgagcgcgagtgggccgatgaatggaaacacctggatcacgccctgaactgcatcatggaaatggtggaaaagacccggcggagcatggccgtcctgagaagatgtcaagagagcgacagagaggaactgaactactggaagcggaggtacaacgagaacaccgagctgcggaaaaccggcactgagctggtgtccagacagcactctcctggctctgccgatagcctgagcaacgactcccagagagagttcaacagcagacccggcacaggctacgtgcccgtggaattttggaagaaaaccgaagaggccgtgaacaaagtcaagattcaggccatgagcgaggtgcagaaagccgtggctgaggccgaacagaaagccttcgaagtgatcgccaccgagcgggccagaatggaacagacaatcgccgacgtgaagagacaggccgccgaggatgccttcctggtcatcaacgagcaagaggaaagcaccgagaactgctggaactgcggcagaaaggccagcgagacatgcagcggctgcaatatcgccagatattgcggcagcttctgccagcacaaggactgggagagacaccacagactgtgcggccagaatctgcacggacagagccctcatggacagggcagacctctgctccctgttggcagaggatctagcgccagatctgccgactgtagcgtgccatctcctgcactggataagaccagcgccaccacaagcagaagcagcacaccagcctctgtgaccgccatcgataccaacggactgtgatgatgaggactagtccctgttcccagagcccacttttttttctttttttgaaataaaatagcctgtctttcagatctaaaaaaaaaaaaaaaaaaaaaaaaaaaaaaaaaaaaaaaaaaaaaaaaaaaaaaaaaaaaaaaaaaaaaaaaaaaaaaaaaaaaaaaaaaaaaaaaaaaa

SEQ ID NO: 1118 - RNA, 1616 nt, synthetic construct
  misc_feature 1..1616: note = Homo sapiens__Q01196-1__RUNX1(K83E_R174Q) mRNA opt3
  source 1..1616: mol_type = other RNA
aggagagtcccgcagtcggcgtccagcggctctgcttgttcgtgtgtgtgtcgttgcaggccttattcaagcttaccatgagaatccccgtggacgccagcacctccaggcggttcacacctccatctactgctctgtcaccgggcaagatgagtgaggcactcccccttggggcccctgatgcgggagctgccctggcaggtaaattgcgcagcggcgaccgatccatggtcgaagttttagccgatcacccaggggagctggtgcgtacggactctcccaactttctatgctcggtactccctacccattggagatgtaatgaaacactgccaattgctttcaaggtggtcgcacttggagatgtgcccgacggcactctggttaccgtgatggccggtaacgatgagaattactcagctgaattgaggaacgccacagcggcaatgaaaaatcaggtcgcccggtttaacgacctccgcttcgtggggagaagcggaaggggcaagagttttaccctgactataacagtattcaccaatcctccacaagttgctacgtatcaccgggccatcaaaattactgtggatggcccgcaggagccccgccgacatagacagaagctggacgatcagaccaagcctgggtccctctcttttagcgagaggttatccgaactggagcaacttcggcgtacagcaatgcgcgtctcaccacaccatcccgctcctactccaaaccccagagccagtttgaatcacagcaccgcgttcaacccgcagcctcagtctcagatgcaagacacaaggcagatccagccctccccaccttggtcatacgatcagagctatcaatacctgggaagtattgcctctccctccgtgcacccagcaacccccatcagccctggtcgggcttcgggcatgacgactctatctgccgaactctcctcacgactgagtacagctccagaccttaccgcctttagcgacccgcgccagttccccgcactgccttccatatctgatccaagaatgcattatcccggggcctttacttacagccctacaccagtgacctcaggaatcggcattggtatgagtgctatggggtccgcgacgaggtatcacacctacttgcccccgccttacccaggaagctctcaggcacaaggcggccccttccaggcctcaagtcctagctatcatctctactatggggcttccgccggatcttaccagttttcgatggtcggtggcgagcggagcccaccccgcatcctgcctccctgcacaaatgcatccactgggtcagccttactgaacccaagtctcccgaatcagtctgacgttgtggaggctgaaggaagccactccaactcacctaccaatatggcccccagcgcaagacttgaggaagcggtatggaggccatattgatgatgaggactagtccctgttcccagagcccacttttttttctttttttgaaataaaatagcctgtctttcagatctaaaaaaaaaaaaaaaaaaaaaaaaaaaaaaaaaaaaaaaaaaaaaaaaaaaaaaaaaaaaaaaaaaaaaaaaaaaaaaaaaaaaaaaaaaaaaaaaaaaa

SEQ ID NO: 1119 - RNA, 2090 nt, synthetic construct
  misc_feature 1..2090: note = Homo sapiens____CBFbeta(1-165)_SMMHC(1527-1972) mRNA opt3
  source 1..2090: mol_type = other RNA
aggagagtcccgcagtcggcgtccagcggctctgcttgttcgtgtgtgtgtcgttgcaggccttattcaagcttaccatgcccagagtggtccctgaccagaggagcaagttcgagaacgaagagtttttccggaaactgtcccgcgaatgcgagatcaagtacaccggctttcgagatcgtccacacgaagagagacaagccaggttccagaatgcttgtcgggacgggcgctctgagattgcatttgttgccacaggaactaacctctcacttcagttctttccggcgagttggcagggtgaacaaagacagacgcccagcagggagtatgtggatctggaacgggaggctggcaaagtatacttgaaggcccctatgatattaaatggggtgtgcgtcatctggaaaggatggattgacctgcagcgcctagatggcatgggttgtctcgagttcgacgaggaacgagcacagcaagaagatgccctggctcagcaggcatttgaggaagccagaaggcggacccgtgagttcgaggaccgcgatagatcccatagggaagagatggaagtgcacgagcttgaaaagtctaagcgggctctggagacacagatggaggaaatgaaaactcaattggaggaactcgaggacgaactgcaggccaccgaggatgcgaagctgcgactcgaggttaacatgcaggcattaaaagggcaatttgaacgcgacctgcaggccagagatgagcagaatgaagagaagaggcggcagcttcaacgccagttgcatgagtatgaaacagagctggaagacgagagaaaacagagggctctagccgcagctgccaagaagaaactcgaaggagacctgaaggatcttgagctgcaggcggactcggccatcaaaggccgtgaggaagcaattaagcaattgcggaaactccaggctcagatgaaggatttccagcgagagctggaagacgccagagcttcaagggatgagatctttgccaccgcaaaagaaaacgagaagaaggccaagagcttagaggctgacctgatgcaactccaggaagatcttgcggcagccgagcgcgctcggaagcaggccgacctggaaaaagaggaattggcagaggagctagccagttccctgtctggcagaaatgctctccaggatgaaaagaggcgcctggaggcccgaatagcacaacttgaagaggagctggaagaggaacaggggaacatggaggcgatgagcgaccgggtgcgtaaagctactcagcaagccgaacagttgtccaatgagctcgcaacagagagatcaaccgcccagaagaacgaaagtgctaggcagcaactggagcgccagaataaggaattacggagcaaactgcacgagatggaaggagccgtcaagtctaaattcaagtccacgatcgcagctctagaggccaaaattgcgcagctcgaggaacaggtggagcaagaagccagagagaagcaggctgcaactaagtcactgaaacagaaggataaaaagttgaaagaaatccttctgcaggtagaggacgagaggaagatggccgaacaatacaaggagcaggctgaaaaaggtaacgcccgagttaagcagctcaaacgccaactggaggaggcagaagaggaaagccagcggattaatgcgaacagaaggaaacttcagcgtgagctggacgaagccaccgagagtaatgaggctatgggccgcgaagtgaacgccttgaaatctaagctccggagagggaacgagacatccttcgtcccaagcaggcgatcgggaggccggcgcgtgatcgaaaatgcagatggttctgaggaagagactgacaccagagatgctgactttaacgggacaaaagcctccgagtgatgatgaggactagtccctgttcccagagcccacttttttttctttttttgaaataaaatagcctgtctttcagatctaaaaaaaaaaaaaaaaaaaaaaaaaaaaaaaaaaaaaaaaaaaaaaaaaaaaaaaaaaaaaaaaaaaaaaaaaaaaaaaaaaaaaaaaaaaaaaaaaaaa

SEQ ID NO: 1120 - RNA, 1805 nt, synthetic construct
  misc_feature 1..1805: note = Artificial____CBFbeta(1-165)_SMMHC(1527-1877) mRNA opt3
  source 1..1805: mol_type = other RNA
aggagagtcccgcagtcggcgtccagcggctctgcttgttcgtgtgtgtgtcgttgcaggccttattcaagcttaccatgcccagagtggtccctgaccagaggagcaagttcgagaacgaagagtttttccggaaactgtcccgcgaatgcgagatcaagtacaccggctttcgagatcgtccacacgaagagagacaagccaggttccagaatgcttgtcgggacgggcgctctgagattgcatttgttgccacaggaactaacctctcacttcagttctttccggcgagttggcagggtgaacaaagacagacgcccagcagggagtatgtggatctggaacgggaggctggcaaagtatacttgaaggcccctatgatattaaatggggtgtgcgtcatctggaaaggatggattgacctgcagcgcctagatggcatgggttgtctcgagttcgacgaggaacgagcacagcaagaagatgccctggctcagcaggcatttgaggaagccagaaggcggacccgtgagttcgaggaccgcgatagatcccatagggaagagatggaagtgcacgagcttgaaaagtctaagcgggctctggagacacagatggaggaaatgaaaactcaattggaggaactcgaggacgaactgcaggccaccgaggatgcgaagctgcgactcgaggttaacatgcaggcattaaaagggcaatttgaacgcgacctgcaggccagagatgagcagaatgaagagaagaggcggcagcttcaacgccagttgcatgagtatgaaacagagctggaagacgagagaaaacagagggctctagccgcagctgccaagaagaaactcgaaggagacctgaaggatcttgagctgcaggcggactcggccatcaaaggccgtgaggaagcaattaagcaattgcggaaactccaggctcagatgaaggatttccagcgagagctggaagacgccagagcttcaagggatgagatctttgccaccgcaaaagaaaacgagaagaaggccaaaagccttgaggctgacctgatgcaactccaggaagatcttgcggcagccgagcgcgctcggaagcaggccgacctggaaaaagaggaattggcagaggagctagccagttccctgtctggcagaaatgctctccaggatgaaaagaggcgcctggaggcccgaatagcacaacttgaagaggagctggaagaggaacaggggaacatggaggcgatgagcgaccgggtgcgtaaagctactcagcaagccgaacagttgtccaatgagctcgcaacagagagatcaaccgcccagaagaacgaaagtgctaggcagcaactggagcgccagaataaggaattacggagcaaactgcacgagatggaaggagccgtcaagtctaaattcaagtccacgatcgcagctctagaggccaaaattgcgcagctcgaggaacaggtggagcaagaagccagagagaagcaggctgcaactaagtcactgaaacagaaggataaaaagttaaaagaaatcttgctgcaggtagaggacgagaggaagatggccgaacaatacaaggagcaggctgaaaaaggtaacgcctgatgatgaggactagtccctgttcccagagcccacttttttttctttttttgaaataaaatagcctgtctttcagatctaaaaaaaaaaaaaaaaaaaaaaaaaaaaaaaaaaaaaaaaaaaaaaaaaaaaaaaaaaaaaaaaaaaaaaaaaaaaaaaaaaaaaaaaaaaaaaaaaaaa

SEQ ID NO: 1121 - RNA, 866 nt, synthetic construct
  misc_feature 1..866: note = Artificial____CBFbeta(1-165)_Linker_Lifeact mRNA opt3
  source 1..866: mol_type = other RNA
aggagagtcccgcagtcggcgtccagcggctctgcttgttcgtgtgtgtgtcgttgcaggccttattcaagcttaccatgcccagagtggtccctgaccagaggagcaagttcgagaacgaagagtttttccggaaactgtcccgcgaatgcgagatcaagtacaccggctttcgagatcgtccacacgaagagagacaagccaggttccagaatgcttgtcgggacgggcgctctgagattgcatttgttgccacaggaactaacctctcacttcagttctttccggcgagttggcagggtgaacaaagacagacgcccagcagggagtatgtggatctggaacgggaggctggcaaagtatacttgaaggcccctatgatattaaatggggtgtgcgtcatctggaaaggatggattgacctgcagcgcctagatggcatgggttgtctcgagttcgacgaggaacgagcacagcaagaagatgccctggctcagcaggcatttgaggaagccagaaggcggacccgtgagttcgaggaccgcgatagatcccatagggaagagatggaagggggatctggcggctcagggggatcgggtggcagcgggggaggcggtgtggctgaccttatcaagaagtttgagagtatttccaaagaagagggggatccacccgttgccacatgatgatgaggactagtccctgttcccagagcccacttttttttctttttttgaaataaaatagcctgtctttcagatctaaaaaaaaaaaaaaaaaaaaaaaaaaaaaaaaaaaaaaaaaaaaaaaaaaaaaaaaaaaaaaaaaaaaaaaaaaaaaaaaaaaaaaaaaaaaaaaaaaaa

SEQ ID NO: 1122 - RNA, 833 nt, synthetic construct
  misc_feature 1..833: note = Artificial____CBFbeta(1-165)_HIF1alpha(549-575) mRNA opt3
  source 1..833: mol_type = other RNA
aggagagtcccgcagtcggcgtccagcggctctgcttgttcgtgtgtgtgtcgttgcaggccttattcaagcttaccatgcccagagtggtccctgaccagaggagcaagttcgagaacgaagagtttttccggaaactgtcccgcgaatgcgagatcaagtacaccggctttcgagatcgtccacacgaagagagacaagccaggttccagaatgcttgtcgggacgggcgctctgagattgcatttgttgccacaggaactaacctctcacttcagttctttccggcgagttggcagggtgaacaaagacagacgcccagcagggagtatgtggatctggaacgggaggctggcaaagtatacttgaaggcccctatgatattaaatggggtgtgcgtcatctggaaaggatggattgacctgcagcgcctagatggcatgggttgtctcgagttcgacgaggaacgagcacagcaagaagatgccctggctcagcaggcatttgaggaagccagaaggcggacccgtgagttcgaggaccgcgatagatcccatagggaagagatggaaccattttctacacaggacactgatcttgacctggagatgttggctccctatatccctatggatgacgacttccaactccggtgatgatgaggactagtccctgttcccagagcccacttttttttctttttttgaaataaaatagcctgtctttcagatctaaaaaaaaaaaaaaaaaaaaaaaaaaaaaaaaaaaaaaaaaaaaaaaaaaaaaaaaaaaaaaaaaaaaaaaaaaaaaaaaaaaaaaaaaaaaaaaaaaaa

SEQ ID NO: 1123 - RNA, 878 nt, synthetic construct
  misc_feature 1..878: note Artificial____CBFbeta(1-165)_Linker_HIF1alpha(549-575) mRNA opt3
  source 1..878: mol_type = other RNA
aggagagtcccgcagtcggcgtccagcggctctgcttgttcgtgtgtgtgtcgttgcaggccttattcaagcttaccatgcccagagtggtccctgaccagaggagcaagttcgagaacgaagagtttttccggaaactgtcccgcgaatgcgagatcaagtacaccggctttcgagatcgtccacacgaagagagacaagccaggttccagaatgcttgtcgggacgggcgctctgagattgcatttgttgccacaggaactaacctctcacttcagttctttccggcgagttggcagggtgaacaaagacagacgcccagcagggagtatgtggatctggaacgggaggctggcaaagtatacttgaaggcccctatgatattaaatggggtgtgcgtcatctggaaaggatggattgacctgcagcgcctagatggcatgggttgtctcgagttcgacgaggaacgagcacagcaagaagatgccctggctcagcaggcatttgaggaagccagaaggcggacccgtgagttcgaggaccgcgatagatcccatagggaagagatggaagggggatctggcggctcagggggatcgggtggcagcgggggaggcccatttagtacacaggacactgatcttgacctggagatgttggctccctatatccctatggatgacgacttccaactccggtgatgatgaggactagtccctgttcccagagcccacttttttttctttttttgaaataaaatagcctgtctttcagatctaaaaaaaaaaaaaaaaaaaaaaaaaaaaaaaaaaaaaaaaaaaaaaaaaaaaaaaaaaaaaaaaaaaaaaaaaaaaaaaaaaaaaaaaaaaaaaaaaaaa

SEQ ID NO: 1124 - RNA, 2513 nt, synthetic construct
  misc_feature 1..2513: note = Artificial____RUNX1(1-177)_N_RUNX1T1a(31-604) mRNA opt3
  source 1..2513: mol_type = other RNA
aggagagtcccgcagtcggcgtccagcggctctgcttgttcgtgtgtgtgtcgttgcaggccttattcaagcttaccatgagaatccccgtggacgccagcacctccaggcggttcacacctccatctactgctctgtcaccgggcaagatgagtgaggcactcccccttggggcccctgatgcgggagctgccctggcaggtaaattgcgcagcggcgaccgatccatggtcgaagttttagccgatcacccaggggagctggtgcgtacggactctcccaactttctatgctcggtactccctacccattggagatgtaataagacactgccaattgctttcaaagtggtcgcacttggagatgtgcccgacggcactctggttaccgtgatggccggtaacgatgaaaattactcagctgagttgaggaacgccacagcggcaatgaagaatcaggtcgcccggtttaacgacctccgcttcgtggggagaagcggaaggggcaaaagttttaccctgactataacagtattcaccaatcctccacaagttgctacgtatcaccgggccatcaagattactgtggatggcccgcgcgaaccccgaaacagaaccgagaagcattccacaatgcctgactctccagtcgatgtgaaaactcagagcaggctgacaccccctaccatgccacccccgcctaccacgcagggggcaccccggacttcctcatttacaccaaccactctcacaaatggaaccagtcacagccctacggctttaaacggtgccccctctccacccaatggcttctccaacgggccttcaagcagttcttccagctcgctggcgaatcagcaacttccaccggcctgcggagcacgtcagttgtctaagctgaaacgctttctaaccacactccagcagttcggcaacgacatctcccccgagattggtgaaagagtgaggactctggtccttgggctggttaattcaaccttgacaatcgaggaatttcatagtaagctccaagaggctactaacttccctctgcggccatttgtgatacccttcttaaaagccaacctgcctctccttcagcgagagctgttgcactgtgctcgcctagccaagcagaatccagcacagtacctggcccaacacgaacagctcctgcttgatgctagcaccacatcccccgtagactctagcgagctgttgctcgacgtgaacgaaaatggaaagagaaggaccccggatcggactaaagagaacggcttcgaccgcgaacctctgcattcagagcacccaagtaagagaccctgcacgatctcccctggccagaggtatagccccaataacgggttatcttaccaaccaaatggactgcctcatcccacaccaccgcctccccagcactatcgtctagatgacatggcgattgcacaccattaccgggattcatatcgacacccaagtcatagagacctcagggatcgcaaccggcccatgggtctgcacggcaccagacaggaggaaatgatcgaccataggcttactgatcgcgagtgggccgaagagtggaaacacttggaccatctgctcaattgtattatggatatggtcgaaaagacccgacggagcctgacagtgcttcgtagatgccaggaggctgacagggaggaactgaactactggatccgccggtactccgacgccgaggatttgaaaaagggcggagggtcttcgagctcccactcaagacaacagagtcctgttaatccagaccccgtggcactcgatgcccacagggaatttctgcatcgacctgcttctggttatgtcccggaggaaatatggaaaaaggccgaggaggcagtgaacgaagtaaagcgccaggcgatgaccgagttacagaaagctgttagcgaagccgagcggaaggcacacgacatgattactacagagagagccaaaatggaaaggacggtggctgaggccaagcgtcaagcagctgaagatgccctggcggtcatcaatcagcaggaggactcctcagaaagctgttggaactgcgggcgcaaagcctctgagacctgttccggctgcaatactgctcggtactgtggaagtttctgccagcacaaggattgggagaagcatcaccatatttgcggccaaacactacaggcacagcagcaaggggacaccccagccgtgtctagctccgtcacacccaactcaggagctggtagtcctatggatactccacccgccgcaacccctagaagcacgaccccgggcacaccctcgactatcgaaaccacaccaaggtgatgatgaggactagtccctgttcccagagcccacttttttttctttttttgaaataaaatagcctgtctttcagatctaaaaaaaaaaaaaaaaaaaaaaaaaaaaaaaaaaaaaaaaaaaaaaaaaaaaaaaaaaaaaaaaaaaaaaaaaaaaaaaaaaaaaaaaaaaaaaaaaaaa

SEQ ID NO: 1125 - RNA, 1028 nt, synthetic construct
  misc_feature 1..1028: note = Artificial____RUNX1(1-241)_RUNX1T1b(short) mRNA opt3
  source 1..1028: mol_type = other RNA
aggagagtcccgcagtcggcgtccagcggctctgcttgttcgtgtgtgtgtcgttgcaggccttattcaagcttaccatgagaatccccgtggacgccagcacctccaggcggttcacacctccatctactgctctgtcaccgggcaagatgagtgaggcactcccccttggggcccctgatgcgggagctgccctggcaggtaaattgcgcagcggcgaccgatccatggtcgaagttttagccgatcacccaggggagctggtgcgtacggactctcccaactttctatgctcggtactccctacccattggagatgtaataagacactgccaattgctttcaaagtggtcgcacttggagatgtgcccgacggcactctggttaccgtgatggccggtaacgatgaaaattactcagctgagttgaggaacgccacagcggcaatgaagaatcaggtcgcccggtttaacgacctccgcttcgtggggagaagcggaaggggcaaaagttttaccctgactataacagtattcaccaatcctccacaagttgctacgtatcaccgggccatcaagattactgtggatggcccgcgcgaaccccgaagacataggcagaagctggacgatcagaccaaacctgggtccctctcttttagcgagcggttatccgagctggaacagcttcgtcgcacagcaatgagagtctcaccacaccatcccgctcctactccaaaccccagggccagtttgaatcacagcaccgcgttcaacccgcaacctcagtctcagatgcaggaggtgggattttgccacgtggcccaagtcggtctgaagctactcggctgatgatgaggactagtccctgttcccagagcccacttttttttctttttttgaaataaaatagcctgtctttcagatctaaaaaaaaaaaaaaaaaaaaaaaaaaaaaaaaaaaaaaaaaaaaaaaaaaaaaaaaaaaaaaaaaaaaaaaaaaaaaaaaaaaaaaaaaaaaaaaaaaaa

SEQ ID NO: 1126 - RNA, 2732 nt, synthetic construct
  misc_feature 1..2732: note = Artificial____RUNX1(1-241)_V_RUNX1T1b(22-604) mRNA opt3
  source 1..2732: mol_type = other RNA
aggagagtcccgcagtcggcgtccagcggctctgcttgttcgtgtgtgtgtcgttgcaggccttattcaagcttaccatgagaatccccgtggacgccagcacctccaggcggttcacacctccatctactgctctgtcaccgggcaagatgagtgaggcactcccccttggggcccctgatgcgggagctgccctggcaggtaaattgcgcagcggcgaccgatccatggtcgaagttttagccgatcacccaggggagctggtgcgtacggactctcccaactttctatgctcggtactccctacccattggagatgtaataagacactgccaattgctttcaaagtggtcgcacttggagatgtgcccgacggcactctggttaccgtgatggccggtaacgatgaaaattactcagctgagttgaggaacgccacagcggcaatgaagaatcaggtcgcccggtttaacgacctccgcttcgtggggagaagcggaaggggcaaaagttttaccctgactataacagtattcaccaatcctccacaagttgctacgtatcaccgggccatcaagattactgtggatggcccgcgcgaaccccgaagacataggcagaagctggacgatcagaccaaacctgggtccctctcttttagcgagcggttatccgagctggaacagcttcgtcgcacagcaatgagagtctcaccacaccatcccgctcctactccaaaccccagggccagtttgaatcacagcaccgcgttcaacccgcaacctcagtctcagatgcaagtgggacccgagaagcgggtgccagccatgcctggttcccccgtcgaagttaaaatccagtcacgaagcagtccacccacaatgcctccactgccgcccattaatcctggcgggccacgccccgtgtcttttacccctacggcactatccaacggaatcaatcacagcccacccactctcaacggcgctccgtcgcctccacagagattctctaatggtcccgcctcctcaacaagtagcgctctgaccaaccagcagcttcctgccacttgcggggcaaggcaactgtccaagttgaaacggtttctcacaaccctgcagcagttcggaaacgacatatctcccgagatcggcgagaaggtacgcacgttagtgctggccctcgtcaatagcaccgtgacaattgaagagtttcattgtaagctacaagaagctactaacttcccactgagacctttcgttatcccctttttgaaagcgaatctaccactgctccagagggagctgcttcactgcgcacgtgccgctaagcagaccccgtcacagtacctggcccaacatgaacacttgctcctgaacacaagtattgcatcccctgccgatagctctgagttactgatggaggtgcacggcaatgggaaacggccctcaccagaacgaagagaggaaaacagtttcgacagggacactatcgctcccgagcctccagccaagcgcgtctgtaccataagccccgcacctcggcattccccggcgctaacagtgccactcatgaatcccggaggtcagtttcaccctaccccaccccctctgcagcattatactcttgaagatattgctacgtctcacttgtacagagagccgaacaaaatgctggagcatagggaagtacgcgaccgacaccactcgctcggcctgaatgggggatatcaggatgagcttgttgaccatcggctgacagaacgtgagtgggccgatgaatggaagcacttggaccatgcactcaactgcatcatggagatggtggagaaaaccagaaggagcatggccgtcctgcgccggtgtcaagaatccgatagagaggaattaaattactggaagaggcgatataacgagaatactgagctgcgcaagaccggcacagaacttgtgtcacggcagcacagtcccggttctgctgacagcctctccaacgattcacagagagagttcaatagcaggccagggaccggctacgtccctgtggaattttggaaaaagactgaggaagccgttaacaaagtgaagattcaggcaatgtctgaggtacaaaaagctgtcgccgaggcggaacagaaggccttcgaggtgatcgctacagaacgtgcacgcatggagcagacgatcgccgacgttaagcggcaggctgccgaagatgcatttctggtgattaacgagcaagaggaatccaccgagaattgctggaactgtggaagaaaagcgagtgaaacttgcagcggctgtaatatagccaggtactgcgggtctttctgccagcacaaggactgggagcgacatcaccggctttgtggacagaacttgcatggtcaatcaccccacggccaggggcgcccactgctccctgtcggaagaggctccagtgctaggagcgccgactgctcggtgccctccccagcactggataaaacatctgctaccacaagccggtcaagtactccggcctccgtaaccgcaatcgacacgaatggtttatgatgatgaggactagtccctgttcccagagcccacttttttttctttttttgaaataaaatagcctgtctttcagatctaaaaaaaaaaaaaaaaaaaaaaaaaaaaaaaaaaaaaaaaaaaaaaaaaaaaaaaaaaaaaaaaaaaaaaaaaaaaaaaaaaaaaaaaaaaaaaaaaaaa

SEQ ID NO: 1127 - RNA, 2732 nt, synthetic construct
  misc_feature 1..2732: note = Artificial____RUNX1(1-241)_I_RUNX1T1b(22-604) mRNA opt3
  source 1..2732: mol_type = other RNA
aggagagtcccgcagtcggcgtccagcggctctgcttgttcgtgtgtgtgtcgttgcaggccttattcaagcttaccatgagaatccccgtggacgccagcacctccaggcggttcacacctccatctactgctctgtcaccgggcaagatgagtgaggcactcccccttggggcccctgatgcgggagctgccctggcaggtaaattgcgcagcggcgaccgatccatggtcgaagttttagccgatcacccaggggagctggtgcgtacggactctcccaactttctatgctcggtactccctacccattggagatgtaataagacactgccaattgctttcaaagtggtcgcacttggagatgtgcccgacggcactctggttaccgtgatggccggtaacgatgaaaattactcagctgagttgaggaacgccacagcggcaatgaagaatcaggtcgcccggtttaacgacctccgcttcgtggggagaagcggaaggggcaaaagttttaccctgactataacagtattcaccaatcctccacaagttgctacgtatcaccgggccatcaagattactgtggatggcccgcgcgaaccccgaagacataggcagaagctggacgatcagaccaaacctgggtccctctcttttagcgagcggttatccgagctggaacagcttcgtcgcacagcaatgagagtctcaccacaccatcccgctcctactccaaaccccagggccagtttgaatcacagcaccgcgttcaacccgcaacctcagtctcagatgcagatcggacccgagaagcgggtgccagccatgcctggttcccccgtggaagtcaaaattcaatcacgaagcagtccacccacaatgcctccactgccgcccatcaatcctggcgggccacgccccgtttcttttacccctacggcactatccaacggaataaatcacagcccacccactctcaacggcgctccgtcgcctccacagagattctctaatggtcccgcctcctcaacaagtagcgctctgaccaaccagcagcttcctgccacttgcggggcaaggcaactgtccaagttgaaacggtttctcacaaccctgcagcagttcggaaacgacatctctcccgagattggcgagaaggtgcgcacgttagtactggccctcgtgaatagcaccgtcacaatcgaagagtttcattgtaagctacaagaagctactaacttcccactgagacctttcgtgattccctttttgaaagcgaatctaccactgctccagagggagctgcttcactgcgcacgtgccgctaagcagaccccgtcacagtacctggcccaacatgaacacttgctcctgaacacaagtatcgcatcccctgccgatagctctgagttactgatggaggttcacggcaatgggaaacggccctcaccagaacgaagagaggaaaacagtttcgacagggacactatagctcccgagcctccagccaagcgcgtgtgtaccattagccccgcacctcggcattccccggcgctaacagtcccactcatgaatcccggaggtcagtttcaccctaccccaccccctctgcagcattatactcttgaagatatcgctacgtctcacttgtacagagagccgaacaaaatgctggagcatagggaagtgcgcgaccgacaccactcgctcggcctgaatgggggatatcaggatgagcttgtagaccatcggctgacagaacgtgagtgggccgatgaatggaagcacttggaccatgcactcaactgcattatggagatggttgagaaaaccagaaggagcatggccgtgctgcgccggtgtcaagaatccgatagagaggaattaaattactggaagaggcgatataacgagaatactgagctgcgcaagaccggcacagaacttgtctcacggcagcacagtcccggttctgctgacagcctctccaacgattcacagagagagttcaatagcaggccagggaccggctacgtgcctgtcgaattttggaaaaagactgaggaagccgtgaacaaagttaagatccaggcaatgtctgaggtgcaaaaagctgtagccgaggcggaacagaaggccttcgaggtcatcgctacagaacgtgcacgcatggagcagacgattgccgacgtgaagcggcaggctgccgaagatgcatttctggttataaacgagcaagaggaatccaccgagaattgctggaactgtggaagaaaagcgagtgaaacttgcagcggctgtaatatcgccaggtactgcgggtctttctgccagcacaaggactgggagcgacatcaccggctttgtggacagaacttgcatggtcaatcaccccacggccaggggcgcccactgctccctgtgggaagaggctccagtgctaggagcgccgactgctcggtcccctccccagcactggataaaacatctgctaccacaagccggtcaagtactccggcctccgtgaccgcaattgacacgaatggtttatgatgatgaggactagtccctgttcccagagcccacttttttttctttttttgaaataaaatagcctgtctttcagatctaaaaaaaaaaaaaaaaaaaaaaaaaaaaaaaaaaaaaaaaaaaaaaaaaaaaaaaaaaaaaaaaaaaaaaaaaaaaaaaaaaaaaaaaaaaaaaaaaaaa

SEQ ID NO: 1128 - RNA, 1616 nt, synthetic construct
  misc_feature 1..1616: note = Homo sapiens__Q01196-1__RUNX1(K83E_R174Q) mRNA opt4
  source 1..1616: mol_type = other RNA
aggagagtcccgcagtcggcgtccagcggctctgcttgttcgtgtgtgtgtcgttgcaggccttattcaagcttaccatgagaatccccgtggacgccagcaccagcagaagattcaccccccccagcaccgccctgagccccggcaagatgagcgaggccctgcccctgggcgcccccgacgccggcgccgccctggccggcaagctgagaagcggcgacagaagcatggtggaggtgctggccgaccaccccggcgagctggtgagaaccgacagccccaacttcctgtgcagcgtgctgcccacccactggagatgcaacgagaccctgcccatcgccttcaaggtggtggccctgggcgacgtgcccgacggcaccctggtgaccgtgatggccggcaacgacgagaactacagcgccgagctgagaaacgccaccgccgccatgaagaaccaggtggccagattcaacgacctgagattcgtgggcagaagcggcagaggcaagagcttcaccctgaccatcaccgtgttcaccaaccccccccaggtggccacctaccacagagccatcaagatcaccgtggacggcccccaggagcccagaagacacagacagaagctggacgaccagaccaagcccggcagcctgagcttcagcgagagactgagcgagctggagcagctgagaagaaccgccatgagagtgagcccccaccaccccgcccccacccccaaccccagagccagcctgaaccacagcaccgccttcaacccccagccccagagccagatgcaggacaccagacagatccagcccagccccccctggagctacgaccagagctaccagtacctgggcagcatcgccagccccagcgtgcaccccgccacccccatcagccccggcagagccagcggcatgaccaccctgagcgccgagctgagcagcagactgagcaccgcccccgacctgaccgccttcagcgaccccagacagttccccgccctgcccagcatcagcgaccccagaatgcactaccccggcgccttcacctacagccccacccccgtgaccagcggcatcggcatcggcatgagcgccatgggcagcgccaccagataccacacctacctgccccccccctaccccggcagcagccaggcccagggcggccccttccaggccagcagccccagctaccacctgtactacggcgccagcgccggcagctaccagttcagcatggtgggcggcgagagaagcccccccagaatcctgcccccctgcaccaacgccagcaccggcagcgccctgctgaaccccagcctgcccaaccagagcgacgtggtggaggccgagggcagccacagcaacagccccaccaacatggcccccagcgccagactggaggaggccgtgtggagaccctactgatgatgaggactagtccctgttcccagagcccacttttttttctttttttgaaataaaatagcctgtctttcagatctaaaaaaaaaaaaaaaaaaaaaaaaaaaaaaaaaaaaaaaaaaaaaaaaaaaaaaaaaaaaaaaaaaaaaaaaaaaaaaaaaaaaaaaaaaaaaaaaaaaa

SEQ ID NO: 1129 - RNA, 2090 nt, synthetic construct
  misc_feature 1..2090: note = Homo sapiens____CBFbeta(1-165)_SMMHC(1527-1972) mRNA opt4
  source 1..2090: mol_type = other RNA
aggagagtcccgcagtcggcgtccagcggctctgcttgttcgtgtgtgtgtcgttgcaggccttattcaagcttaccatgcccagagtggtgcccgaccagagaagcaagttcgagaacgaggagttcttcagaaagctgagcagagagtgcgagatcaagtacaccggcttcagagacagaccccacgaggagagacaggccagattccagaacgcctgcagagacggcagaagcgagatcgccttcgtggccaccggcaccaacctgagcctgcagttcttccccgccagctggcagggcgagcagagacagacccccagcagagagtacgtggacctggagagagaggccggcaaggtgtacctgaaggcccccatgatcctgaacggcgtgtgcgtgatctggaagggctggatcgacctgcagagactggacggcatgggctgcctggagttcgacgaggagagagcccagcaggaggacgccctggcccagcaggccttcgaggaggccagaagaagaaccagagagttcgaggacagagacagaagccacagagaggagatggaggtgcacgagctggagaagagcaagagagccctggagacccagatggaggagatgaagacccagctggaggagctggaggacgagctgcaggccaccgaggacgccaagctgagactggaggtgaacatgcaggccctgaagggccagttcgagagagacctgcaggccagagacgagcagaacgaggagaagagaagacagctgcagagacagctgcacgagtacgagaccgagctggaggacgagagaaagcagagagccctggccgccgccgccaagaagaagctggagggcgacctgaaggacctggagctgcaggccgacagcgccatcaagggcagagaggaggccatcaagcagctgagaaagctgcaggcccagatgaaggacttccagagagagctggaggacgccagagccagcagagacgagatcttcgccaccgccaaggagaacgagaagaaggccaagagcctggaggccgacctgatgcagctgcaggaggacctggccgccgccgagagagccagaaagcaggccgacctggagaaggaggagctggccgaggagctggccagcagcctgagcggcagaaacgccctgcaggacgagaagagaagactggaggccagaatcgcccagctggaggaggagctggaggaggagcagggcaacatggaggccatgagcgacagagtgagaaaggccacccagcaggccgagcagctgagcaacgagctggccaccgagagaagcaccgcccagaagaacgagagcgccagacagcagctggagagacagaacaaggagctgagaagcaagctgcacgagatggagggcgccgtgaagagcaagttcaagagcaccatcgccgccctggaggccaagatcgcccagctggaggagcaggtggagcaggaggccagagagaagcaggccgccaccaagagcctgaagcagaaggacaagaagctgaaggagatcctgctgcaggtggaggacgagagaaagatggccgagcagtacaaggagcaggccgagaagggcaacgccagagtgaagcagctgaagagacagctggaggaggccgaggaggagagccagagaatcaacgccaacagaagaaagctgcagagagagctggacgaggccaccgagagcaacgaggccatgggcagagaggtgaacgccctgaagagcaagctgagaagaggcaacgagaccagcttcgtgcccagcagaagaagcggcggcagaagagtgatcgagaacgccgacggcagcgaggaggagaccgacaccagagacgccgacttcaacggcaccaaggccagcgagtgatgatgaggactagtccctgttcccagagcccacttttttttctttttttgaaataaaatagcctgtctttcagatctaaaaaaaaaaaaaaaaaaaaaaaaaaaaaaaaaaaaaaaaaaaaaaaaaaaaaaaaaaaaaaaaaaaaaaaaaaaaaaaaaaaaaaaaaaaaaaaaaaaa

SEQ ID NO: 1130 - RNA, 1805 nt, synthetic construct
  misc_feature 1..1805: note = Artificial____CBFbeta(1-165)_SMMHC(1527-1877) mRNA opt4
  source 1..1805: mol_type = other RNA
aggagagtcccgcagtcggcgtccagcggctctgcttgttcgtgtgtgtgtcgttgcaggccttattcaagcttaccatgcccagagtggtgcccgaccagagaagcaagttcgagaacgaggagttcttcagaaagctgagcagagagtgcgagatcaagtacaccggcttcagagacagaccccacgaggagagacaggccagattccagaacgcctgcagagacggcagaagcgagatcgccttcgtggccaccggcaccaacctgagcctgcagttcttccccgccagctggcagggcgagcagagacagacccccagcagagagtacgtggacctggagagagaggccggcaaggtgtacctgaaggcccccatgatcctgaacggcgtgtgcgtgatctggaagggctggatcgacctgcagagactggacggcatgggctgcctggagttcgacgaggagagagcccagcaggaggacgccctggcccagcaggccttcgaggaggccagaagaagaaccagagagttcgaggacagagacagaagccacagagaggagatggaggtgcacgagctggagaagagcaagagagccctggagacccagatggaggagatgaagacccagctggaggagctggaggacgagctgcaggccaccgaggacgccaagctgagactggaggtgaacatgcaggccctgaagggccagttcgagagagacctgcaggccagagacgagcagaacgaggagaagagaagacagctgcagagacagctgcacgagtacgagaccgagctggaggacgagagaaagcagagagccctggccgccgccgccaagaagaagctggagggcgacctgaaggacctggagctgcaggccgacagcgccatcaagggcagagaggaggccatcaagcagctgagaaagctgcaggcccagatgaaggacttccagagagagctggaggacgccagagccagcagagacgagatcttcgccaccgccaaggagaacgagaagaaggccaagagcctggaggccgacctgatgcagctgcaggaggacctggccgccgccgagagagccagaaagcaggccgacctggagaaggaggagctggccgaggagctggccagcagcctgagcggcagaaacgccctgcaggacgagaagagaagactggaggccagaatcgcccagctggaggaggagctggaggaggagcagggcaacatggaggccatgagcgacagagtgagaaaggccacccagcaggccgagcagctgagcaacgagctggccaccgagagaagcaccgcccagaagaacgagagcgccagacagcagctggagagacagaacaaggagctgagaagcaagctgcacgagatggagggcgccgtgaagagcaagttcaagagcaccatcgccgccctggaggccaagatcgcccagctggaggagcaggtggagcaggaggccagagagaagcaggccgccaccaagagcctgaagcagaaggacaagaagctgaaggagatcctgctgcaggtggaggacgagagaaagatggccgagcagtacaaggagcaggccgagaagggcaacgcctgatgatgaggactagtccctgttcccagagcccacttttttttctttttttgaaataaaatagcctgtctttcagatctaaaaaaaaaaaaaaaaaaaaaaaaaaaaaaaaaaaaaaaaaaaaaaaaaaaaaaaaaaaaaaaaaaaaaaaaaaaaaaaaaaaaaaaaaaaaaaaaaaaa

SEQ ID NO: 1131 - RNA, 866 nt, synthetic construct
  misc_feature 1..866: note = Artificial____CBFbeta(1-165)_Linker_Lifeact mRNA opt4
  source 1..866: mol_type = other RNA
aggagagtcccgcagtcggcgtccagcggctctgcttgttcgtgtgtgtgtcgttgcaggccttattcaagcttaccatgcccagagtggtgcccgaccagagaagcaagttcgagaacgaggagttcttcagaaagctgagcagagagtgcgagatcaagtacaccggcttcagagacagaccccacgaggagagacaggccagattccagaacgcctgcagagacggcagaagcgagatcgccttcgtggccaccggcaccaacctgagcctgcagttcttccccgccagctggcagggcgagcagagacagacccccagcagagagtacgtggacctggagagagaggccggcaaggtgtacctgaaggcccccatgatcctgaacggcgtgtgcgtgatctggaagggctggatcgacctgcagagactggacggcatgggctgcctggagttcgacgaggagagagcccagcaggaggacgccctggcccagcaggccttcgaggaggccagaagaagaaccagagagttcgaggacagagacagaagccacagagaggagatggagggcggcagcggcggcagcggcggcagcggcggcagcggcggcggcggcgtggccgacctgatcaagaagttcgagagcatcagcaaggaggagggcgacccccccgtggccacctgatgatgaggactagtccctgttcccagagcccacttttttttctttttttgaaataaaatagcctgtctttcagatctaaaaaaaaaaaaaaaaaaaaaaaaaaaaaaaaaaaaaaaaaaaaaaaaaaaaaaaaaaaaaaaaaaaaaaaaaaaaaaaaaaaaaaaaaaaaaaaaaaaa

SEQ ID NO: 1132 - RNA, 833 nt, synthetic construct
  misc_feature 1..833: note = Artificial____CBFbeta(1-165)_HIF1alpha(549-575) mRNA opt4
  source 1..833: mol_type = other RNA
aggagagtcccgcagtcggcgtccagcggctctgcttgttcgtgtgtgtgtcgttgcaggccttattcaagcttaccatgcccagagtggtgcccgaccagagaagcaagttcgagaacgaggagttcttcagaaagctgagcagagagtgcgagatcaagtacaccggcttcagagacagaccccacgaggagagacaggccagattccagaacgcctgcagagacggcagaagcgagatcgccttcgtggccaccggcaccaacctgagcctgcagttcttccccgccagctggcagggcgagcagagacagacccccagcagagagtacgtggacctggagagagaggccggcaaggtgtacctgaaggcccccatgatcctgaacggcgtgtgcgtgatctggaagggctggatcgacctgcagagactggacggcatgggctgcctggagttcgacgaggagagagcccagcaggaggacgccctggcccagcaggccttcgaggaggccagaagaagaaccagagagttcgaggacagagacagaagccacagagaggagatggagcccttcagcacccaggacaccgacctggacctggagatgctggccccctacatccccatggacgacgacttccagctgagatgatgatgaggactagtccctgttcccagagcccacttttttttctttttttgaaataaaatagcctgtctttcagatctaaaaaaaaaaaaaaaaaaaaaaaaaaaaaaaaaaaaaaaaaaaaaaaaaaaaaaaaaaaaaaaaaaaaaaaaaaaaaaaaaaaaaaaaaaaaaaaaaaaa

SEQ ID NO: 1133 - RNA, 878 nt, synthetic construct
  misc_feature 1..878: note Artificial____CBFbeta(1-165)_Linker_HIF1alpha(549-575) mRNA opt4
  source 1..878: mol_type = other RNA
aggagagtcccgcagtcggcgtccagcggctctgcttgttcgtgtgtgtgtcgttgcaggccttattcaagcttaccatgcccagagtggtgcccgaccagagaagcaagttcgagaacgaggagttcttcagaaagctgagcagagagtgcgagatcaagtacaccggcttcagagacagaccccacgaggagagacaggccagattccagaacgcctgcagagacggcagaagcgagatcgccttcgtggccaccggcaccaacctgagcctgcagttcttccccgccagctggcagggcgagcagagacagacccccagcagagagtacgtggacctggagagagaggccggcaaggtgtacctgaaggcccccatgatcctgaacggcgtgtgcgtgatctggaagggctggatcgacctgcagagactggacggcatgggctgcctggagttcgacgaggagagagcccagcaggaggacgccctggcccagcaggccttcgaggaggccagaagaagaaccagagagttcgaggacagagacagaagccacagagaggagatggagggcggcagcggcggcagcggcggcagcggcggcagcggcggcggccccttcagcacccaggacaccgacctggacctggagatgctggccccctacatccccatggacgacgacttccagctgagatgatgatgaggactagtccctgttcccagagcccacttttttttctttttttgaaataaaatagcctgtctttcagatctaaaaaaaaaaaaaaaaaaaaaaaaaaaaaaaaaaaaaaaaaaaaaaaaaaaaaaaaaaaaaaaaaaaaaaaaaaaaaaaaaaaaaaaaaaaaaaaaaaaa

SEQ ID NO: 1134 - RNA, 2513 nt, synthetic construct
  misc_feature 1..2513: note = Artificial____RUNX1(1-177)_N_RUNX1T1a(31-604) mRNA opt4
  source 1..2513: mol_type = other RNA
aggagagtcccgcagtcggcgtccagcggctctgcttgttcgtgtgtgtgtcgttgcaggccttattcaagcttaccatgagaatccccgtggacgccagcaccagcagaagattcaccccccccagcaccgccctgagccccggcaagatgagcgaggccctgcccctgggcgcccccgacgccggcgccgccctggccggcaagctgagaagcggcgacagaagcatggtggaggtgctggccgaccaccccggcgagctggtgagaaccgacagccccaacttcctgtgcagcgtgctgcccacccactggagatgcaacaagaccctgcccatcgccttcaaggtggtggccctgggcgacgtgcccgacggcaccctggtgaccgtgatggccggcaacgacgagaactacagcgccgagctgagaaacgccaccgccgccatgaagaaccaggtggccagattcaacgacctgagattcgtgggcagaagcggcagaggcaagagcttcaccctgaccatcaccgtgttcaccaaccccccccaggtggccacctaccacagagccatcaagatcaccgtggacggccccagagagcccagaaacagaaccgagaagcacagcaccatgcccgacagccccgtggacgtgaagacccagagcagactgaccccccccaccatgccccccccccccaccacccagggcgcccccagaaccagcagcttcacccccaccaccctgaccaacggcaccagccacagccccaccgccctgaacggcgcccccagcccccccaacggcttcagcaacggccccagcagcagcagcagcagcagcctggccaaccagcagctgccccccgcctgcggcgccagacagctgagcaagctgaagagattcctgaccaccctgcagcagttcggcaacgacatcagccccgagatcggcgagagagtgagaaccctggtgctgggcctggtgaacagcaccctgaccatcgaggagttccacagcaagctgcaggaggccaccaacttccccctgagacccttcgtgatccccttcctgaaggccaacctgcccctgctgcagagagagctgctgcactgcgccagactggccaagcagaaccccgcccagtacctggcccagcacgagcagctgctgctggacgccagcaccaccagccccgtggacagcagcgagctgctgctggacgtgaacgagaacggcaagagaagaacccccgacagaaccaaggagaacggcttcgacagagagcccctgcacagcgagcaccccagcaagagaccctgcaccatcagccccggccagagatacagccccaacaacggcctgagctaccagcccaacggcctgccccaccccacccccccccccccccagcactacagactggacgacatggccatcgcccaccactacagagacagctacagacaccccagccacagagacctgagagacagaaacagacccatgggcctgcacggcaccagacaggaggagatgatcgaccacagactgaccgacagagagtgggccgaggagtggaagcacctggaccacctgctgaactgcatcatggacatggtggagaagaccagaagaagcctgaccgtgctgagaagatgccaggaggccgacagagaggagctgaactactggatcagaagatacagcgacgccgaggacctgaagaagggcggcggcagcagcagcagccacagcagacagcagagccccgtgaaccccgaccccgtggccctggacgcccacagagagttcctgcacagacccgccagcggctacgtgcccgaggagatctggaagaaggccgaggaggccgtgaacgaggtgaagagacaggccatgaccgagctgcagaaggccgtgagcgaggccgagagaaaggcccacgacatgatcaccaccgagagagccaagatggagagaaccgtggccgaggccaagagacaggccgccgaggacgccctggccgtgatcaaccagcaggaggacagcagcgagagctgctggaactgcggcagaaaggccagcgagacctgcagcggctgcaacaccgccagatactgcggcagcttctgccagcacaaggactgggagaagcaccaccacatctgcggccagaccctgcaggcccagcagcagggcgacacccccgccgtgagcagcagcgtgacccccaacagcggcgccggcagccccatggacaccccccccgccgccacccccagaagcaccacccccggcacccccagcaccatcgagaccacccccagatgatgatgaggactagtccctgttcccagagcccacttttttttctttttttgaaataaaatagcctgtctttcagatctaaaaaaaaaaaaaaaaaaaaaaaaaaaaaaaaaaaaaaaaaaaaaaaaaaaaaaaaaaaaaaaaaaaaaaaaaaaaaaaaaaaaaaaaaaaaaaaaaaaa

SEQ ID NO: 1135 - RNA, 1028 nt, synthetic construct
  misc_feature 1..1028: note = Artificial____RUNX1(1-241)_RUNX1T1b(short) mRNA opt4
  source 1..1028: mol_type = other RNA
aggagagtcccgcagtcggcgtccagcggctctgcttgttcgtgtgtgtgtcgttgcaggccttattcaagcttaccatgagaatccccgtggacgccagcaccagcagaagattcaccccccccagcaccgccctgagccccggcaagatgagcgaggccctgcccctgggcgcccccgacgccggcgccgccctggccggcaagctgagaagcggcgacagaagcatggtggaggtgctggccgaccaccccggcgagctggtgagaaccgacagccccaacttcctgtgcagcgtgctgcccacccactggagatgcaacaagaccctgcccatcgccttcaaggtggtggccctgggcgacgtgcccgacggcaccctggtgaccgtgatggccggcaacgacgagaactacagcgccgagctgagaaacgccaccgccgccatgaagaaccaggtggccagattcaacgacctgagattcgtgggcagaagcggcagaggcaagagcttcaccctgaccatcaccgtgttcaccaaccccccccaggtggccacctaccacagagccatcaagatcaccgtggacggccccagagagcccagaagacacagacagaagctggacgaccagaccaagcccggcagcctgagcttcagcgagagactgagcgagctggagcagctgagaagaaccgccatgagagtgagcccccaccaccccgcccccacccccaaccccagagccagcctgaaccacagcaccgccttcaacccccagccccagagccagatgcaggaggtgggcttctgccacgtggcccaggtgggcctgaagctgctgggctgatgatgaggactagtccctgttcccagagcccacttttttttctttttttgaaataaaatagcctgtctttcagatctaaaaaaaaaaaaaaaaaaaaaaaaaaaaaaaaaaaaaaaaaaaaaaaaaaaaaaaaaaaaaaaaaaaaaaaaaaaaaaaaaaaaaaaaaaaaaaaaaaaa

SEQ ID NO: 1136 - RNA, 2732 nt, synthetic construct
  misc_feature 1..2732: note = Artificial____RUNX1(1-241)_V_RUNX1T1b(22-604) mRNA opt4
  source 1..2732: mol_type = other RNA
aggagagtcccgcagtcggcgtccagcggctctgcttgttcgtgtgtgtgtcgttgcaggccttattcaagcttaccatgagaatccccgtggacgccagcaccagcagaagattcaccccccccagcaccgccctgagccccggcaagatgagcgaggccctgcccctgggcgcccccgacgccggcgccgccctggccggcaagctgagaagcggcgacagaagcatggtggaggtgctggccgaccaccccggcgagctggtgagaaccgacagccccaacttcctgtgcagcgtgctgcccacccactggagatgcaacaagaccctgcccatcgccttcaaggtggtggccctgggcgacgtgcccgacggcaccctggtgaccgtgatggccggcaacgacgagaactacagcgccgagctgagaaacgccaccgccgccatgaagaaccaggtggccagattcaacgacctgagattcgtgggcagaagcggcagaggcaagagcttcaccctgaccatcaccgtgttcaccaaccccccccaggtggccacctaccacagagccatcaagatcaccgtggacggccccagagagcccagaagacacagacagaagctggacgaccagaccaagcccggcagcctgagcttcagcgagagactgagcgagctggagcagctgagaagaaccgccatgagagtgagcccccaccaccccgcccccacccccaaccccagagccagcctgaaccacagcaccgccttcaacccccagccccagagccagatgcaggtgggccccgagaagagagtgcccgccatgcccggcagccccgtggaggtgaagatccagagcagaagcagcccccccaccatgccccccctgccccccatcaaccccggcggccccagacccgtgagcttcacccccaccgccctgagcaacggcatcaaccacagcccccccaccctgaacggcgcccccagccccccccagagattcagcaacggccccgccagcagcaccagcagcgccctgaccaaccagcagctgcccgccacctgcggcgccagacagctgagcaagctgaagagattcctgaccaccctgcagcagttcggcaacgacatcagccccgagatcggcgagaaggtgagaaccctggtgctggccctggtgaacagcaccgtgaccatcgaggagttccactgcaagctgcaggaggccaccaacttccccctgagacccttcgtgatccccttcctgaaggccaacctgcccctgctgcagagagagctgctgcactgcgccagagccgccaagcagacccccagccagtacctggcccagcacgagcacctgctgctgaacaccagcatcgccagccccgccgacagcagcgagctgctgatggaggtgcacggcaacggcaagagacccagccccgagagaagagaggagaacagcttcgacagagacaccatcgcccccgagccccccgccaagagagtgtgcaccatcagccccgcccccagacacagccccgccctgaccgtgcccctgatgaaccccggcggccagttccaccccacccccccccccctgcagcactacaccctggaggacatcgccaccagccacctgtacagagagcccaacaagatgctggagcacagagaggtgagagacagacaccacagcctgggcctgaacggcggctaccaggacgagctggtggaccacagactgaccgagagagagtgggccgacgagtggaagcacctggaccacgccctgaactgcatcatggagatggtggagaagaccagaagaagcatggccgtgctgagaagatgccaggagagcgacagagaggagctgaactactggaagagaagatacaacgagaacaccgagctgagaaagaccggcaccgagctggtgagcagacagcacagccccggcagcgccgacagcctgagcaacgacagccagagagagttcaacagcagacccggcaccggctacgtgcccgtggagttctggaagaagaccgaggaggccgtgaacaaggtgaagatccaggccatgagcgaggtgcagaaggccgtggccgaggccgagcagaaggccttcgaggtgatcgccaccgagagagccagaatggagcagaccatcgccgacgtgaagagacaggccgccgaggacgccttcctggtgatcaacgagcaggaggagagcaccgagaactgctggaactgcggcagaaaggccagcgagacctgcagcggctgcaacatcgccagatactgcggcagcttctgccagcacaaggactgggagagacaccacagactgtgcggccagaacctgcacggccagagcccccacggccagggcagacccctgctgcccgtgggcagaggcagcagcgccagaagcgccgactgcagcgtgcccagccccgccctggacaagaccagcgccaccaccagcagaagcagcacccccgccagcgtgaccgccatcgacaccaacggcctgtgatgatgaggactagtccctgttcccagagcccacttttttttctttttttgaaataaaatagcctgtctttcagatctaaaaaaaaaaaaaaaaaaaaaaaaaaaaaaaaaaaaaaaaaaaaaaaaaaaaaaaaaaaaaaaaaaaaaaaaaaaaaaaaaaaaaaaaaaaaaaaaaaaa

SEQ ID NO: 1137 - RNA, 2732 nt, synthetic construct
  misc_feature 1..2732: note = Artificial____RUNX1(1-241)_I_RUNX1T1b(22-604) mRNA opt4
  source 1..2732: mol_type = other RNA
aggagagtcccgcagtcggcgtccagcggctctgcttgttcgtgtgtgtgtcgttgcaggccttattcaagcttaccatgagaatccccgtggacgccagcaccagcagaagattcaccccccccagcaccgccctgagccccggcaagatgagcgaggccctgcccctgggcgcccccgacgccggcgccgccctggccggcaagctgagaagcggcgacagaagcatggtggaggtgctggccgaccaccccggcgagctggtgagaaccgacagccccaacttcctgtgcagcgtgctgcccacccactggagatgcaacaagaccctgcccatcgccttcaaggtggtggccctgggcgacgtgcccgacggcaccctggtgaccgtgatggccggcaacgacgagaactacagcgccgagctgagaaacgccaccgccgccatgaagaaccaggtggccagattcaacgacctgagattcgtgggcagaagcggcagaggcaagagcttcaccctgaccatcaccgtgttcaccaaccccccccaggtggccacctaccacagagccatcaagatcaccgtggacggccccagagagcccagaagacacagacagaagctggacgaccagaccaagcccggcagcctgagcttcagcgagagactgagcgagctggagcagctgagaagaaccgccatgagagtgagcccccaccaccccgcccccacccccaaccccagagccagcctgaaccacagcaccgccttcaacccccagccccagagccagatgcagatcggccccgagaagagagtgcccgccatgcccggcagccccgtggaggtgaagatccagagcagaagcagcccccccaccatgccccccctgccccccatcaaccccggcggccccagacccgtgagcttcacccccaccgccctgagcaacggcatcaaccacagcccccccaccctgaacggcgcccccagccccccccagagattcagcaacggccccgccagcagcaccagcagcgccctgaccaaccagcagctgcccgccacctgcggcgccagacagctgagcaagctgaagagattcctgaccaccctgcagcagttcggcaacgacatcagccccgagatcggcgagaaggtgagaaccctggtgctggccctggtgaacagcaccgtgaccatcgaggagttccactgcaagctgcaggaggccaccaacttccccctgagacccttcgtgatccccttcctgaaggccaacctgcccctgctgcagagagagctgctgcactgcgccagagccgccaagcagacccccagccagtacctggcccagcacgagcacctgctgctgaacaccagcatcgccagccccgccgacagcagcgagctgctgatggaggtgcacggcaacggcaagagacccagccccgagagaagagaggagaacagcttcgacagagacaccatcgcccccgagccccccgccaagagagtgtgcaccatcagccccgcccccagacacagccccgccctgaccgtgcccctgatgaaccccggcggccagttccaccccacccccccccccctgcagcactacaccctggaggacatcgccaccagccacctgtacagagagcccaacaagatgctggagcacagagaggtgagagacagacaccacagcctgggcctgaacggcggctaccaggacgagctggtggaccacagactgaccgagagagagtgggccgacgagtggaagcacctggaccacgccctgaactgcatcatggagatggtggagaagaccagaagaagcatggccgtgctgagaagatgccaggagagcgacagagaggagctgaactactggaagagaagatacaacgagaacaccgagctgagaaagaccggcaccgagctggtgagcagacagcacagccccggcagcgccgacagcctgagcaacgacagccagagagagttcaacagcagacccggcaccggctacgtgcccgtggagttctggaagaagaccgaggaggccgtgaacaaggtgaagatccaggccatgagcgaggtgcagaaggccgtggccgaggccgagcagaaggccttcgaggtgatcgccaccgagagagccagaatggagcagaccatcgccgacgtgaagagacaggccgccgaggacgccttcctggtgatcaacgagcaggaggagagcaccgagaactgctggaactgcggcagaaaggccagcgagacctgcagcggctgcaacatcgccagatactgcggcagcttctgccagcacaaggactgggagagacaccacagactgtgcggccagaacctgcacggccagagcccccacggccagggcagacccctgctgcccgtgggcagaggcagcagcgccagaagcgccgactgcagcgtgcccagccccgccctggacaagaccagcgccaccaccagcagaagcagcacccccgccagcgtgaccgccatcgacaccaacggcctgtgatgatgaggactagtccctgttcccagagcccacttttttttctttttttgaaataaaatagcctgtctttcagatctaaaaaaaaaaaaaaaaaaaaaaaaaaaaaaaaaaaaaaaaaaaaaaaaaaaaaaaaaaaaaaaaaaaaaaaaaaaaaaaaaaaaaaaaaaaaaaaaaaaa

SEQ ID NO: 1138 - RNA, 1616 nt, synthetic construct
  misc_feature 1..1616: note = Homo sapiens__Q01196-1__RUNX1(K83E_R174Q) mRNA opt5
  source 1..1616: mol_type = other RNA
aggagagtcccgcagtcggcgtccagcggctctgcttgttcgtgtgtgtgtcgttgcaggccttattcaagcttaccatgagaatccccgtggacgccagcacctcccggcgcttcacacctccgtctacggctctgagccccggcaagatgtccgaggccctccctctgggggcgcccgatgctggagccgcccttgctggcaaactgagatctggggaccggagcatggtcgaagttctcgccgatcaccctggagagctggtgcgcaccgactcccccaactttctttgctctgtgctgcctacacattggagatgtaatgaaaccctcccgattgctttcaaggtcgtggccctgggcgatgttcccgacgggacactggtgaccgtcatggcgggaaacgatgagaattacagcgccgaactccggaacgctacagccgctatgaaaaatcaggtggcccgctttaacgacctgagattcgttggccggtccggccgcggaaagagctttacccttacgatcaccgtgttcacaaatcctccccaagtcgcgacctatcacagagccattaaaatcacagtggatgggcctcaggagccccggcgccatagacagaagctggacgatcagaccaagccgggctctctctcctttagcgagcggctgtctgaacttgagcaactgcgcagaacggctatgcgggtgtcccctcaccatcccgcccctacacccaaccccagagctagcctcaatcactctaccgccttcaaccctcagccgcagtcccagatgcaagacacacgccagattcagcccagccctccctggtcctacgatcagtcttatcaatacctggggagcatcgcctcccctagcgtccaccccgctaccccgatctctcctggacgggcgtccggcatgaccacactgagcgccgaactctctagcagactgtccacggctcccgaccttaccgccttttctgaccctcgccagttccccgccctgcctagcatttccgatccccggatgcattatccgggggcttttacatacagccctacccccgttacatctggaatcggcattggcatgtccgccatggggagcgcgaccagatatcacacgtacctgccccctccgtaccccggatcttcccaggctcaaggcgggcctttccaggccagctccccctcttatcatctctactatggagccagcgctggctcctaccagttttctatggtcgggggagagcgcagccctccccggatccttcctccctgcacaaatgcctccaccggcagcgctctgctcaacccgtctctgcctaatcagtccgacgtggtggaggccgaaggcagccactctaactcccccaccaatatggcgcctagcgccagactggaggaagctgtgtggcgcccctattgatgatgaggactagtccctgttcccagagcccacttttttttctttttttgaaataaaatagcctgtctttcagatctaaaaaaaaaaaaaaaaaaaaaaaaaaaaaaaaaaaaaaaaaaaaaaaaaaaaaaaaaaaaaaaaaaaaaaaaaaaaaaaaaaaaaaaaaaaaaaaaaaaa

SEQ ID NO: 1139 - RNA, 2090 nt, synthetic construct
  misc_feature 1..2090: note = Homo sapiens____CBFbeta(1-165)_SMMHC(1527-1972) mRNA opt5
  source 1..2090: mol_type = other RNA
aggagagtcccgcagtcggcgtccagcggctctgcttgttcgtgtgtgtgtcgttgcaggccttattcaagcttaccatgcccagagtggtccctgaccagcggagcaagttcgagaacgaagagtttttccgcaaactgtccagagaatgcgagatcaagtacaccggctttcgggatcgcccgcacgaagagagacaagcccggttccagaatgcttgtcgcgacgggagatctgagattgcctttgttgcgacaggaacgaacctcagcctgcagttctttcccgcttcctggcagggcgaacaacggcagaccccttctcgcgagtatgtggatcttgaaagagaggccgggaaagtgtacctgaaggcccccatgatcctcaatggagtctgcgtgatttggaaaggctggatcgacctgcagcggcttgatgggatgggatgtctggagttcgacgaggaacgcgctcagcaagaagatgccctcgctcagcaggcctttgaggaagcgagacggcgcacaagagagttcgaggaccgggatagaagccatcgcgaagagatggaagttcacgagctggaaaagtccaagcgggccctggagacccagatggaggaaatgaaaacacaactcgaggaactggaggacgaacttcaggctaccgaggatgccaagctgagactcgaggtgaacatgcaggctctgaaaggccaatttgaacgcgaccttcaggcccgggatgagcagaatgaagagaagagacgccagctgcaacggcagctccatgagtatgaaacagagctggaagacgagagaaaacagcgcgcgctggccgctgccgctaagaagaaactcgaaggcgacctgaaggatcttgagctgcaggccgactctgccattaaagggcgggaggaagctatcaagcaactcagaaaactgcaggcgcagatgaaggatttccagcgcgagcttgaagacgcccgggctagcagagatgagatctttgccaccgccaaagaaaacgagaagaaggctaaatccctggaggccgacctcatgcaactgcaggaagatctggcggctgccgagcgggcccgcaagcaggctgacctcgaaaaagaggaactggccgaggagcttgctagctctctgtccggaagaaatgccctccaggatgaaaagcggagactggaggcgcgcattgcccaacttgaagaggagctggaagaggaacagggcaacatggaggctatgagcgaccgggtcagaaaagccacgcagcaagctgaacagctctctaatgagctggccaccgagcgctccacagcgcagaagaacgaaagcgccagacagcaactggagcggcagaataaggaactccgctctaaactgcacgagatggaaggggctgtgaagtccaaattcaagagcaccatcgccgctcttgaggccaaaattgcccagctggaggaacaggttgagcaagaagctagagagaagcaggcggccacaaagtccctcaaacagaaggataaaaagctgaaagaaatcctgcttcaggtggaggacgagcggaagatggctgaacaatacaaggagcaggccgaaaaaggaaacgcccgcgtcaagcagctcaaaagacaactggaggaggctgaagaggaatctcagcggattaatgccaaccgcagaaagctgcagcgggagctcgacgaagcgaccgagagcaatgaggctatgggccgcgaagtgaacgccctgaaatccaaacttagacgggggaacgagacgagcttcgtgccttctagacgctccggaggccggagagtcatcgaaaatgccgatggcagcgaggaagagacagacacccgcgatgctgactttaacgggacaaaggcctctgagtgatgatgaggactagtccctgttcccagagcccacttttttttctttttttgaaataaaatagcctgtctttcagatctaaaaaaaaaaaaaaaaaaaaaaaaaaaaaaaaaaaaaaaaaaaaaaaaaaaaaaaaaaaaaaaaaaaaaaaaaaaaaaaaaaaaaaaaaaaaaaaaaaaa

SEQ ID NO: 1140 - RNA, 1805 nt, synthetic construct
  misc_feature 1..1805: note = Artificial____CBFbeta(1-165)_SMMHC(1527-1877) mRNA opt5
  source 1..1805: mol_type = other RNA
aggagagtcccgcagtcggcgtccagcggctctgcttgttcgtgtgtgtgtcgttgcaggccttattcaagcttaccatgcccagagtggtccctgaccagcggagcaagttcgagaacgaagagtttttccgcaaactgtccagagaatgcgagatcaagtacaccggctttcgggatcgcccgcacgaagagagacaagcccggttccagaatgcttgtcgcgacgggagatctgagattgcctttgttgcgacaggaacgaacctcagcctgcagttctttcccgcttcctggcagggcgaacaacggcagaccccttctcgcgagtatgtggatcttgaaagagaggccgggaaagtgtacctgaaggcccccatgatcctcaatggagtctgcgtgatttggaaaggctggatcgacctgcagcggcttgatgggatgggatgtctggagttcgacgaggaacgcgctcagcaagaagatgccctcgctcagcaggcctttgaggaagcgagacggcgcacaagagagttcgaggaccgggatagaagccatcgcgaagagatggaagttcacgagctggaaaagtccaagcgggccctggagacccagatggaggaaatgaaaacacaactcgaggaactggaggacgaacttcaggctaccgaggatgccaagctgagactcgaggtgaacatgcaggctctgaaaggccaatttgaacgcgaccttcaggcccgggatgagcagaatgaagagaagagacgccagctgcaacggcagctccatgagtatgaaacagagctggaagacgagagaaaacagcgcgcgctggccgctgccgctaagaagaaactcgaaggcgacctgaaggatcttgagctgcaggccgactctgccattaaagggcgggaggaagctatcaagcaactcagaaaactgcaggcgcagatgaaggatttccagcgcgagcttgaagacgcccgggctagcagagatgagatctttgccaccgccaaagaaaacgagaagaaggctaaatccctggaggccgacctcatgcaactgcaggaagatctggcggctgccgagcgggcccgcaagcaggctgacctcgaaaaagaggaactggccgaggagcttgctagctctctgtccggaagaaatgccctccaggatgaaaagcggagactggaggcgcgcattgcccaacttgaagaggagctggaagaggaacagggcaacatggaggctatgagcgaccgggtcagaaaagccacgcagcaagctgaacagctctctaatgagctggccaccgagcgctccacagcgcagaagaacgaaagcgccagacagcaactggagcggcagaataaggaactccgctctaaactgcacgagatggaaggggctgtgaagtccaaattcaagagcaccatcgccgctcttgaggccaaaattgcccagctggaggaacaggttgagcaagaagctagagagaagcaggcggccacaaagtccctcaaacagaaggataaaaagctgaaagaaatcctgcttcaggtggaggacgagcggaagatggctgaacaatacaaggagcaggccgaaaaaggaaacgcctgatgatgaggactagtccctgttcccagagcccacttttttttctttttttgaaataaaatagcctgtctttcagatctaaaaaaaaaaaaaaaaaaaaaaaaaaaaaaaaaaaaaaaaaaaaaaaaaaaaaaaaaaaaaaaaaaaaaaaaaaaaaaaaaaaaaaaaaaaaaaaaaaaa

SEQ ID NO: 1141 - RNA, 866 nt, synthetic construct
  misc_feature 1..866: note = Artificial____CBFbeta(1-165)_Linker_Lifeact mRNA opt5
  source 1..866: mol_type = other RNA
aggagagtcccgcagtcggcgtccagcggctctgcttgttcgtgtgtgtgtcgttgcaggccttattcaagcttaccatgcccagagtggtccctgaccagcggagcaagttcgagaacgaagagtttttccgcaaactgtccagagaatgcgagatcaagtacaccggctttcgggatcgcccgcacgaagagagacaagcccggttccagaatgcttgtcgcgacgggagatctgagattgcctttgttgcgacaggaacgaacctcagcctgcagttctttcccgcttcctggcagggcgaacaacggcagaccccttctcgcgagtatgtggatcttgaaagagaggccgggaaagtgtacctgaaggcccccatgatcctcaatggagtctgcgtgatttggaaaggctggatcgacctgcagcggcttgatgggatgggatgtctggagttcgacgaggaacgcgctcagcaagaagatgccctcgctcagcaggcctttgaggaagcgagacggcgcacaagagagttcgaggaccgggatagaagccatcgcgaagagatggaaggcggctccgggggatctggcgggagcggaggctccgggggaggcggcgttgccgacctgattaagaagtttgagagcatctctaaagaagagggggatcctcccgtggctacctgatgatgaggactagtccctgttcccagagcccacttttttttctttttttgaaataaaatagcctgtctttcagatctaaaaaaaaaaaaaaaaaaaaaaaaaaaaaaaaaaaaaaaaaaaaaaaaaaaaaaaaaaaaaaaaaaaaaaaaaaaaaaaaaaaaaaaaaaaaaaaaaaaa

SEQ ID NO: 1142 - RNA, 833 nt, synthetic construct
  misc_feature 1..833: note = Artificial____CBFbeta(1-165)_HIF1alpha(549-575) mRNA opt5
  source 1..833: mol_type = other RNA
aggagagtcccgcagtcggcgtccagcggctctgcttgttcgtgtgtgtgtcgttgcaggccttattcaagcttaccatgcccagagtggtccctgaccagcggagcaagttcgagaacgaagagtttttccgcaaactgtccagagaatgcgagatcaagtacaccggctttcgggatcgcccgcacgaagagagacaagcccggttccagaatgcttgtcgcgacgggagatctgagattgcctttgttgcgacaggaacgaacctcagcctgcagttctttcccgcttcctggcagggcgaacaacggcagaccccttctcgcgagtatgtggatcttgaaagagaggccgggaaagtgtacctgaaggcccccatgatcctcaatggagtctgcgtgatttggaaaggctggatcgacctgcagcggcttgatgggatgggatgtctggagttcgacgaggaacgcgctcagcaagaagatgccctcgctcagcaggcctttgaggaagcgagacggcgcacaagagagttcgaggaccgggatagaagccatcgcgaagagatggaacctttttccacccaggacacagatctggacctggagatgctcgccccctatattcctatggatgacgacttccaactgcggtgatgatgaggactagtccctgttcccagagcccacttttttttctttttttgaaataaaatagcctgtctttcagatctaaaaaaaaaaaaaaaaaaaaaaaaaaaaaaaaaaaaaaaaaaaaaaaaaaaaaaaaaaaaaaaaaaaaaaaaaaaaaaaaaaaaaaaaaaaaaaaaaaaa

SEQ ID NO: 1143 - RNA, 878 nt, synthetic construct
  misc_feature 1..878: note Artificial____CBFbeta(1-165)_Linker_HIF1alpha(549-575) mRNA opt5
  source 1..878: mol_type = other RNA
aggagagtcccgcagtcggcgtccagcggctctgcttgttcgtgtgtgtgtcgttgcaggccttattcaagcttaccatgcccagagtggtccctgaccagcggagcaagttcgagaacgaagagtttttccgcaaactgtccagagaatgcgagatcaagtacaccggctttcgggatcgcccgcacgaagagagacaagcccggttccagaatgcttgtcgcgacgggagatctgagattgcctttgttgcgacaggaacgaacctcagcctgcagttctttcccgcttcctggcagggcgaacaacggcagaccccttctcgcgagtatgtggatcttgaaagagaggccgggaaagtgtacctgaaggcccccatgatcctcaatggagtctgcgtgatttggaaaggctggatcgacctgcagcggcttgatgggatgggatgtctggagttcgacgaggaacgcgctcagcaagaagatgccctcgctcagcaggcctttgaggaagcgagacggcgcacaagagagttcgaggaccgggatagaagccatcgcgaagagatggaaggcggctccgggggatctggcgggagcggaggctccgggggaggcccttttagcacccaggacacagatctggacctggagatgctcgccccctatattcctatggatgacgacttccaactgcggtgatgatgaggactagtccctgttcccagagcccacttttttttctttttttgaaataaaatagcctgtctttcagatctaaaaaaaaaaaaaaaaaaaaaaaaaaaaaaaaaaaaaaaaaaaaaaaaaaaaaaaaaaaaaaaaaaaaaaaaaaaaaaaaaaaaaaaaaaaaaaaaaaaa

SEQ ID NO: 1144 - RNA, 2513 nt, synthetic construct
  misc_feature 1..2513: note = Artificial____RUNX1(1-177)_N_RUNX1T1a(31-604) mRNA opt5
  source 1..2513: mol_type = other RNA
aggagagtcccgcagtcggcgtccagcggctctgcttgttcgtgtgtgtgtcgttgcaggccttattcaagcttaccatgagaatccccgtggacgccagcacctcccggcgcttcacacctccgtctacggctctgagccccggcaagatgtccgaggccctccctctgggggcgcccgatgctggagccgcccttgctggcaaactgagatctggggaccggagcatggtcgaagttctcgccgatcaccctggagagctggtgcgcaccgactcccccaactttctttgctctgtgctgcctacacattggagatgtaataagaccctcccgattgctttcaaagtcgtggccctgggcgatgttcccgacgggacactggtgaccgtcatggcgggaaacgatgaaaattacagcgccgagctccggaacgctacagccgctatgaagaatcaggtggcccgctttaacgacctgagattcgttggccggtccggccgcgggaaatcttttacccttacgatcaccgtgttcacaaatcctccccaagtcgcgacctatcacagagccattaagatcacagtggatggacctcgggaaccccgcaacagaaccgagaagcattctacgatgccggactcccctgtggatgtcaaaacacagagccggctgacaccccctaccatgccccctcccccgaccacccagggcgctccccgcacatcttcctttacgcctaccacactcaccaatgggacaagccactctcccaccgccctgaacggagctccttccccgcccaatggcttcagcaacgggccttcctctagctccagcagctcccttgccaatcagcaactgccccctgcctgcggagctagacagctcagcaagctgaaacggtttctgacgacactccagcagttcggcaacgacatttctcccgagatcggcgaaagagttcgcaccctggtgcttgggctggtgaatagcaccctcacaatcgaggaatttcattccaagctgcaagaggcgaccaacttccctcttcggccctttgtcattccgttcctgaaagccaacctccctctgctgcagagagagctcctgcactgtgctcgccttgccaagcagaatcccgcccagtacctggctcaacacgaacagctcctgcttgatgcctctacaacgagccccgtggactccagcgagctgctcctggacgttaacgaaaatggaaagcggagaacccctgatcgcacaaaagagaacggcttcgaccgggaaccgctgcattctgagcacccctccaagagaccttgcaccatcagccccgggcagcgctattctcctaataacggactctcctaccaacccaatggcctgcctcatcccacaccgcctccccctcagcactatcggcttgatgacatggcgattgctcaccattacagagatagctatcgccacccctcccatcgggacctgagagatcggaaccgcccgatggggctccacggaaccagacaggaggaaatgatcgaccatcggctgacggatagagagtgggccgaagagtggaaacacctggaccaccttctcaattgtattatggatatggtggaaaagacccgccggtctctgacagtcctgagacgctgccaggaggccgacagagaggaactcaactactggatccggcgctacagcgacgctgaggatctgaaaaagggcggcgggtcctctagctcccatagcagacaacagtctcctgtgaatcccgaccctgttgcccttgatgctcaccgggaatttctgcatcgccccgcctccggatatgtgcccgaggaaatttggaaaaaggcggaggaggccgtcaacgaagtgaagagacaggctatgaccgagctccagaaagccgtcagcgaagctgagcggaaggcccacgacatgatcacaaccgagcgcgcgaaaatggaaagaacggtggccgaggctaagcggcaagccgctgaagatgccctggccgttatcaatcagcaggaggactcttccgaaagctgttggaactgcggccgcaaagctagcgagacatgtagcgggtgcaataccgcgagatactgtggatccttctgccagcacaaggattgggagaagcatcaccatatttgcggccaaacactgcaggcccagcagcaaggggacacccctgctgtgtcttcttccgtcaccccgaacagcggcgccggatcccccatggatacacctcccgccgctacgcctcggtctaccacacccggcacccctagcacaatcgaaaccacgccgagatgatgatgaggactagtccctgttcccagagcccacttttttttctttttttgaaataaaatagcctgtctttcagatctaaaaaaaaaaaaaaaaaaaaaaaaaaaaaaaaaaaaaaaaaaaaaaaaaaaaaaaaaaaaaaaaaaaaaaaaaaaaaaaaaaaaaaaaaaaaaaaaaaaa

SEQ ID NO: 1145 - RNA, 1028 nt, synthetic construct
  misc_feature 1..1028: note = Artificial____RUNX1(1-241)_RUNX1T1b(short) mRNA opt5
  source 1..1028: mol_type = other RNA
aggagagtcccgcagtcggcgtccagcggctctgcttgttcgtgtgtgtgtcgttgcaggccttattcaagcttaccatgagaatccccgtggacgccagcacctcccggcgcttcacacctccgtctacggctctgagccccggcaagatgtccgaggccctccctctgggggcgcccgatgctggagccgcccttgctggcaaactgagatctggggaccggagcatggtcgaagttctcgccgatcaccctggagagctggtgcgcaccgactcccccaactttctttgctctgtgctgcctacacattggagatgtaataagaccctcccgattgctttcaaagtcgtggccctgggcgatgttcccgacgggacactggtgaccgtcatggcgggaaacgatgaaaattacagcgccgagctccggaacgctacagccgctatgaagaatcaggtggcccgctttaacgacctgagattcgttggccggtccggccgcgggaaatcttttacccttacgatcaccgtgttcacaaatcctccccaagtcgcgacctatcacagagccattaagatcacagtggatggacctcgggaaccccgcagacatcggcagaagctggacgatcagaccaaaccgggcagcctctcctttagcgagcgcctgtctgagcttgaacagctgagacggacggctatgagagtgtcccctcaccatcccgcccctacacccaacccccgcgctagcctcaatcactctaccgccttcaaccctcaaccgcagtcccagatgcaggaggtcgggttttgccacgttgcccaagtgggactgaagctgctcggctgatgatgaggactagtccctgttcccagagcccacttttttttctttttttgaaataaaatagcctgtctttcagatctaaaaaaaaaaaaaaaaaaaaaaaaaaaaaaaaaaaaaaaaaaaaaaaaaaaaaaaaaaaaaaaaaaaaaaaaaaaaaaaaaaaaaaaaaaaaaaaaaaaa

SEQ ID NO: 1146 - RNA, 2732 nt, synthetic construct
  misc_feature 1..2732: note = Artificial____RUNX1(1-241)_V_RUNX1T1b(22-604) mRNA opt5
  source 1..2732: mol_type = other RNA
aggagagtcccgcagtcggcgtccagcggctctgcttgttcgtgtgtgtgtcgttgcaggccttattcaagcttaccatgagaatccccgtggacgccagcacctcccggcgcttcacacctccgtctacggctctgagccccggcaagatgtccgaggccctccctctgggggcgcccgatgctggagccgcccttgctggcaaactgagatctggggaccggagcatggtcgaagttctcgccgatcaccctggagagctggtgcgcaccgactcccccaactttctttgctctgtgctgcctacacattggagatgtaataagaccctcccgattgctttcaaagtcgtggccctgggcgatgttcccgacgggacactggtgaccgtcatggcgggaaacgatgaaaattacagcgccgagctccggaacgctacagccgctatgaagaatcaggtggcccgctttaacgacctgagattcgttggccggtccggccgcgggaaatcttttacccttacgatcaccgtgttcacaaatcctccccaagtcgcgacctatcacagagccattaagatcacagtggatggacctcgggaaccccgcagacatcggcagaagctggacgatcagaccaaaccgggcagcctctcctttagcgagcgcctgtctgagcttgaacagctgagacggacggctatgagagtgtcccctcaccatcccgcccctacacccaacccccgcgctagcctcaatcactctaccgccttcaaccctcaaccgcagtcccagatgcaggtcgggcccgagaagcgggttcctgccatgcccggaagccctgtggaagtgaaaattcaatccagatctagccctccgacaatgcctcccctgcctcccatcaatcctggcgggccccgcccggtctcctttacccctaccgctctgagcaacggaatcaatcactctcctcccacactcaacggcgcgccctccccgccccagcggttcagcaatggccctgcctctagcacgtcctctgctctgaccaaccagcagcttcccgccacatgcggggccagacaactgagcaagctcaaacgctttctgaccacacttcagcagttcggaaacgacatttcccctgagatcggcgagaaggtgcggaccctggttctcgctctggtgaatagcacggtcacaattgaagagtttcattgtaagctgcaagaagccaccaacttccccctcagacctttcgtgatcccctttctgaaagcgaatcttccgctgctccagcgcgagctgcttcactgcgctcgggccgccaagcagaccccttctcagtacctggctcaacatgaacacctcctgctgaacacatccattgccagccccgctgattcttccgagctcctgatggaggttcacgggaatggaaaaagacctagccccgaacgccgggaggaaaactccttcgacagagacaccatcgccccggagcctcccgcgaagcgggtgtgtacaatttctcctgctccccgccatagccccgcccttacggtccctctgatgaatccgggcgggcagtttcaccccacccctccccctctccagcattatacactggaagatatcgccacctcccacctgtacagagagcccaacaaaatgcttgagcatcgggaagtgagagaccgccaccactctctcggactgaatggcggctatcaggatgagctggtcgaccatcggctcacagaaagagagtgggctgatgaatggaagcacctggaccatgcccttaactgcatcatggagatggtggagaaaacccgcagaagcatggcggttctgcggcgctgtcaagaatccgatagagaggaactcaattactggaagcggcgctataacgagaatacggagctgagaaagaccgggacagaactggtgagccggcagcactctcctggatccgccgacagcctttctaacgattcccagcgcgagttcaatagcagaccgggcaccgggtacgtccccgtggaattttggaaaaagacagaggaagctgttaacaaagtgaagattcaggccatgtctgaggtccaaaaagctgtggccgaggccgaacagaaggctttcgaggtgatcgcgaccgaacgggcccgcatggagcagacgattgctgacgttaagagacaggccgccgaagatgcttttctcgtcatcaacgagcaagaggaaagcacagagaattgctggaactgtggacggaaagcctccgaaacctgcagcggctgtaatattgcgagatactgcgggtctttctgccagcacaaggactgggagcgccatcaccggctgtgtggccagaacctgcatggacaatcccctcacggccaggggagacccctcctgcctgtgggacgcggcagctccgctcggtctgccgactgcagcgtgccctccccggcccttgataaaacatctgctaccaccagcagatcctctacacccgccagcgtcacggcgatcgacaccaatgggctgtgatgatgaggactagtccctgttcccagagcccacttttttttctttttttgaaataaaatagcctgtctttcagatctaaaaaaaaaaaaaaaaaaaaaaaaaaaaaaaaaaaaaaaaaaaaaaaaaaaaaaaaaaaaaaaaaaaaaaaaaaaaaaaaaaaaaaaaaaaaaaaaaaaa

SEQ ID NO: 1147 - RNA, 2732 nt, synthetic construct
  misc_feature 1..2732: note = Artificial____RUNX1(1-241)_I_RUNX1T1b(22-604) mRNA opt5
  source 1..2732: mol_type = other RNA
aggagagtcccgcagtcggcgtccagcggctctgcttgttcgtgtgtgtgtcgttgcaggccttattcaagcttaccatgagaatccccgtggacgccagcacctcccggcgcttcacacctccgtctacggctctgagccccggcaagatgtccgaggccctccctctgggggcgcccgatgctggagccgcccttgctggcaaactgagatctggggaccggagcatggtcgaagttctcgccgatcaccctggagagctggtgcgcaccgactcccccaactttctttgctctgtgctgcctacacattggagatgtaataagaccctcccgattgctttcaaagtcgtggccctgggcgatgttcccgacgggacactggtgaccgtcatggcgggaaacgatgaaaattacagcgccgagctccggaacgctacagccgctatgaagaatcaggtggcccgctttaacgacctgagattcgttggccggtccggccgcgggaaatcttttacccttacgatcaccgtgttcacaaatcctccccaagtcgcgacctatcacagagccattaagatcacagtggatggacctcgggaaccccgcagacatcggcagaagctggacgatcagaccaaaccgggcagcctctcctttagcgagcgcctgtctgagcttgaacagctgagacggacggctatgagagtgtcccctcaccatcccgcccctacacccaacccccgcgctagcctcaatcactctaccgccttcaaccctcaaccgcagtcccagatgcagattgggcccgagaagcgggtccctgccatgcccggaagccctgttgaagtgaaaatccaatccagatctagccctccgacaatgcctcccctgcctcccatcaatcctggcgggccccgcccggtgtcctttacccctaccgctctgagcaacggaattaatcactctcctcccacactcaacggcgcgccctccccgccccagcggttcagcaatggccctgcctctagcacgtcctctgctctgaccaaccagcagcttcccgccacatgcggggccagacaactgagcaagctcaaacgctttctgaccacacttcagcagttcggaaacgacatctcccctgagattggcgagaaggtccggaccctggtgctcgctctggttaatagcacggtgacaatcgaagagtttcattgtaagctgcaagaagccaccaacttccccctcagacctttcgtcattccctttctgaaagcgaatcttccgctgctccagcgcgagctgcttcactgcgctcgggccgccaagcagaccccttctcagtacctggctcaacatgaacacctcctgctgaacacatccatcgccagccccgctgattcttccgagctcctgatggaggtgcacgggaatggaaaaagacctagccccgaacgccgggaggaaaactccttcgacagagacaccattgccccggagcctcccgcgaagcgggtttgtacaatctctcctgctccccgccatagccccgcccttacggtgcctctgatgaatccgggcgggcagtttcaccccacccctccccctctccagcattatacactggaagatatcgccacctcccacctgtacagagagcccaacaaaatgcttgagcatcgggaagtcagagaccgccaccactctctcggactgaatggcggctatcaggatgagctggtggaccatcggctcacagaaagagagtgggctgatgaatggaagcacctggaccatgcccttaactgcattatggagatggtcgagaaaacccgcagaagcatggcggtgctgcggcgctgtcaagaatccgatagagaggaactcaattactggaagcggcgctataacgagaatacggagctgagaaagaccgggacagaactggttagccggcagcactctcctggatccgccgacagcctttctaacgattcccagcgcgagttcaatagcagaccgggcaccgggtacgtgcccgtcgaattttggaaaaagacagaggaagctgtgaacaaagttaagatccaggccatgtctgaggtgcaaaaagctgtcgccgaggccgaacagaaggctttcgaggtgattgcgaccgaacgggcccgcatggagcagacgatcgctgacgtgaagagacaggccgccgaagatgcttttctcgttattaacgagcaagaggaaagcacagagaattgctggaactgtggacggaaagcctccgaaacctgcagcggctgtaatatcgcgagatactgcgggtctttctgccagcacaaggactgggagcgccatcaccggctgtgtggccagaacctgcatggacaatcccctcacggccaggggagacccctcctgcctgtcggacgcggcagctccgctcggtctgccgactgcagcgtgccctccccggcccttgataaaacatctgctaccaccagcagatcctctacacccgccagcgtgacggcgatcgacaccaatgggctgtgatgatgaggactagtccctgttcccagagcccacttttttttctttttttgaaataaaatagcctgtctttcagatctaaaaaaaaaaaaaaaaaaaaaaaaaaaaaaaaaaaaaaaaaaaaaaaaaaaaaaaaaaaaaaaaaaaaaaaaaaaaaaaaaaaaaaaaaaaaaaaaaaaa

SEQ ID NO: 1148 - RNA, 1616 nt, synthetic construct
  misc_feature 1..1616: note = Homo sapiens__Q01196-1__RUNX1(K83E_R174Q) mRNA opt11
  source 1..1616: mol_type = other RNA
aggagagtcccgcagtcggcgtccagcggctctgcttgttcgtgtgtgtgtcgttgcaggccttattcaagcttaccatgcgcatcccagtagacgcctcaacctcacgtcgcttcacccctccctcaacagccctctcacccggcaaaatgtccgaagcattacccctcggtgcccccgacgcaggcgcagcactcgccggcaaacttcgatctggcgaccgatccatggtcgaagtcctagccgaccaccccggcgaactcgtacgaacagactcacccaatttcctctgctccgtcctccccactcactggcgctgcaacgaaaccctgcccattgccttcaaagtcgtcgcacttggcgacgtcccagacggcaccctagtaacagtaatggccggaaacgacgaaaactactcagcagaactacgcaacgccaccgccgccatgaaaaaccaagtagcccgcttcaacgatctacgattcgtcggccgatccggacgtggcaaatccttcactcttacaatcacagtcttcacaaatcccccacaagtcgccacctaccaccgcgccatcaaaattaccgttgacggcccccaagaaccaagacgccatcgtcaaaaacttgacgaccaaaccaaacccggctcactatcattctccgaacgcctctccgaactcgaacaactccgccgcaccgccatgcgcgtctcaccccaccaccccgctcccacaccaaaccccagggcctcccttaaccactccaccgcattcaacccccaaccacaatcccaaatgcaagacacacgacaaatacaaccatccccaccgtggtcatacgaccaatcttaccaatacctcggttctatagcctccccatccgtccacccagccacacccatctcccccggccgcgcatccggaatgaccacactctcagccgaactctcctcccgcctatcaaccgcccctgacctcaccgccttttccgacccccgacaattccccgcactaccgtcaatctccgacccccgaatgcactatcccggcgccttcacctactcccccacacctgtaacctccggcatcggcatcggcatgtccgccatgggaagcgccaccagatatcatacttacctacccccaccttatccaggatcctcacaagcccaaggcggcccttttcaagcctcctccccctcctaccatctctactacggcgcctccgccggctcctaccaattctccatggtcggcggcgaacgatcaccaccccgaatcctccctccctgcaccaacgcatcgaccggatcggccctcttaaacccctccctccccaaccaatcagacgtcgtcgaagccgaaggatctcactccaactcccccacaaacatggcaccttcagcccgcctcgaagaagccgtctggcgcccctactaatgatgaggactagtccctgttcccagagcccacttttttttctttttttgaaataaaatagcctgtctttcagatctaaaaaaaaaaaaaaaaaaaaaaaaaaaaaaaaaaaaaaaaaaaaaaaaaaaaaaaaaaaaaaaaaaaaaaaaaaaaaaaaaaaaaaaaaaaaaaaaaaaa

SEQ ID NO: 1149 - RNA, 2090 nt, synthetic construct
  misc_feature 1..2090: note = Homo sapiens____CBFbeta(1-165)_SMMHC(1527-1972) mRNA opt11
  source 1..2090: mol_type = other RNA
aggagagtcccgcagtcggcgtccagcggctctgcttgttcgtgtgtgtgtcgttgcaggccttattcaagcttaccatgccaagggtggtgcccgaccagagaagcaagttcgaaaatgaggaatttttccggaagctgagcagggaatgcgagataaaatacacgggcttccgagacagaccacacgaagagaggcaagcgaggttccaaaacgcctgcagagacggaagaagcgagatagcgttcgtggccacggggacgaacctgagcctacagttcttccctgcaagctggcaaggagaacagaggcagacaccgagtagggagtacgtggacctggagagggaggcggggaaggtgtacctgaaggcaccaatgatactaaatggagtatgtgtaatctggaagggatggatagacctgcaacggctggacgggatgggatgcctggagttcgacgaggaaagagcgcagcaagaggacgcgctggcacaacaggcgttcgaggaagcaaggaggcggacgcgagagttcgaggacagggataggagccacagagaggagatggaggtacacgagctagagaaaagcaagagggcgctggaaacacaaatggaggagatgaagacacagctggaggagttggaagacgaactgcaagcgacagaggacgcaaagctgaggctggaagtcaacatgcaggcattaaagggacagttcgagagagacctgcaggcaagagacgagcagaacgaggaaaagaggaggcagctccaaaggcagctgcacgagtacgaaacggaactggaggacgagcgaaagcagagggcgctagcagcagcagcaaagaaaaagctggagggggacctgaaggacctggagttgcaggcagacagcgcaataaaagggagggaagaggcgatcaagcaactaagaaagctgcaggcacaaatgaaggatttccagagagagctagaggatgcaagggcaagccgggacgagatattcgcgacggcaaaagaaaacgagaaaaaggcgaaaagcctagaagcagacctgatgcagctacaggaggatttggcggcggcggagagggcaaggaaacaggcagatctggagaaggaggagctggcggaagagttggcaagtagcctaagcggaaggaatgcgctgcaggacgaaaagcggagactcgaggcgagaatagcacagctagaggaggaactggaggaggagcagggaaacatggaagcgatgagcgacagagtgagaaaggcgacgcaacaggcggaacagctaagcaacgagttagcaacggagagaagtacagcccaaaagaatgaaagtgcaaggcaacagctagagaggcagaacaaggaactgaggagcaagctgcacgagatggaaggagcagtgaaaagcaaattcaaaagcaccatcgcggcgctggaagcgaagatagcgcagctggaggagcaggtagaacaagaggcaagagagaagcaagcggcgacaaagagtctaaagcagaaagacaagaaactgaaagagatactgttacaagtggaggacgaaaggaagatggcagagcaatacaaggagcaggcggaaaaggggaacgcgagggtgaaacagttaaagaggcaactggaggaggcggaggaagagagccaaagaataaacgccaacagaaggaaactacagcgggaattggacgaggcaacagagagtaacgaagccatggggcgagaagtgaacgcactaaagagcaaactgaggcgggggaacgagacgagtttcgtaccgagcaggcggagcggagggagaagggtgatagagaatgcagacggcagcgaagaggaaacggacacgagagacgcagacttcaacgggacgaaggcgagcgaatagtgatgaggactagtccctgttcccagagcccacttttttttctttttttgaaataaaatagcctgtctttcagatctaaaaaaaaaaaaaaaaaaaaaaaaaaaaaaaaaaaaaaaaaaaaaaaaaaaaaaaaaaaaaaaaaaaaaaaaaaaaaaaaaaaaaaaaaaaaaaaaaaaa

SEQ ID NO: 1150 - RNA, 1805 nt, synthetic construct
  misc_feature 1..1805: note = Artificial____CBFbeta(1-165)_SMMHC(1527-1877) mRNA opt11
  source 1..1805: mol_type = other RNA
aggagagtcccgcagtcggcgtccagcggctctgcttgttcgtgtgtgtgtcgttgcaggccttattcaagcttaccatgccgagggtggtgccagaccaaaggagcaagttcgagaacgaggaatttttcagaaagctgagcagagagtgcgagataaagtacacggggtttagagacagaccacacgaggagaggcaggcaaggttccagaacgcatgcagagacgggagaagcgagatagcattcgtagcgacaggaacaaacctaagcctacaatttttcccggcgagctggcagggagagcagagacagacgccaagcagggagtacgtggacctagagagggaagcaggaaaggtgtacctaaaggcaccaatgatactaaatggggtgtgcgtaatatggaaggggtggatagacctacagagactggacgggatgggatgcttggagttcgacgaagagagagcgcaacaggaggacgcactggcacaacaagcattcgaagaggcaaggaggaggacgagagagttcgaggacagagacaggagtcacagggaggaaatggaggtacacgaactagagaaaagcaagagggcgctggagacacagatggaagagatgaaaacgcaactggaggagctggaagacgagctgcaggcaacagaagatgcgaagctaaggctggaggtgaacatgcaggcactgaaaggacagttcgaaagggacctgcaggcgagggacgaacagaacgaggaaaagaggaggcagctccagaggcagctacacgagtacgagacggagttggaagacgagagaaagcaaagagcactagcggcggcggcgaagaaaaagctagagggagacctcaaagatctggagctacaggcagacagcgcgataaagggcagggaggaagcgataaagcagctaaggaagctgcaggcacagatgaaggacttccagagggagctcgaggacgcaagagcgagccgggacgagatattcgccacggcaaaggagaacgaaaagaaggcgaaaagcctggaggcggacctaatgcaactgcaagaagacctggcagcggcagagcgagcgaggaagcaggcagacctagagaaggaggagctggcggaagaactggcgagtagcctgagcggaaggaacgcactgcaggacgagaagaggaggctagaggcaagaatagcgcagctggaggaggagttggaggaggagcaggggaacatggaggcgatgagcgacagagtgagaaaggcgacacagcaagcagagcagttaagcaacgagctggcaacagagagaagcacggcgcaaaagaacgaatcagcgaggcaacagttggagaggcagaacaaggaactaagaagcaagctgcacgagatggagggcgcggtaaagagcaaattcaagtcaacaatagcggcgcttgaggcaaagatagcacagctggaagaacaagtagaacaggaggcgagagagaaacaagcagcgacaaagagcctgaaacagaaggacaagaagttaaaggagatactgctacaggtagaggacgaaagaaaaatggcggaacagtacaaagagcaggcagaaaaggggaacgcataatgatgaggactagtccctgttcccagagcccacttttttttctttttttgaaataaaatagcctgtctttcagatctaaaaaaaaaaaaaaaaaaaaaaaaaaaaaaaaaaaaaaaaaaaaaaaaaaaaaaaaaaaaaaaaaaaaaaaaaaaaaaaaaaaaaaaaaaaaaaaaaaaa

SEQ ID NO: 1151 - RNA, 866 nt, synthetic construct
  misc_feature 1..866: note = Artificial____CBFbeta(1-165)_Linker_Lifeact mRNA opt11
  source 1..866: mol_type = other RNA
aggagagtcccgcagtcggcgtccagcggctctgcttgttcgtgtgtgtgtcgttgcaggccttattcaagcttaccatgccgcgcgtggtcccggaccagcgctcgaaatttgaaaatgaagagttctttcgcaagctctcgcgagagtgcgagataaagtacacgggctttcgcgatagaccgcacgaggaaaggcaagcgcgctttcaaaatgcctgtagagatggcaggagcgagatcgcgttcgtggccacgggcacgaacttgagcctgcaatttttcccggcctcgtggcagggcgagcagaggcaaacgccctcgcgcgagtacgtggacttggaaagggaagcgggcaaggtgtatctaaaggccccgatgatactaaatggagtgtgcgtgatctggaaagggtggatagacctgcaaaggctcgatggaatgggctgtctagagttcgatgaggaacgcgcgcaacaggaagacgcattggcacagcaagcgttcgaggaagcacgcaggagaacgcgcgagttcgaggacagggacaggagccatcgcgaggaaatggaagggggctcgggagggagcgggggctctggcgggagcgggggaggaggcgtggccgatctcatcaaaaagttcgagagcataagcaaagaagagggcgatcccccggtagcgacatagtgatgaggactagtccctgttcccagagcccacttttttttctttttttgaaataaaatagcctgtctttcagatctaaaaaaaaaaaaaaaaaaaaaaaaaaaaaaaaaaaaaaaaaaaaaaaaaaaaaaaaaaaaaaaaaaaaaaaaaaaaaaaaaaaaaaaaaaaaaaaaaaaa

SEQ ID NO: 1152 - RNA, 833 nt, synthetic construct
  misc_feature 1..833: note = Artificial____CBFbeta(1-165)_HIF1alpha(549-575) mRNA opt11
  source 1..833: mol_type = other RNA
aggagagtcccgcagtcggcgtccagcggctctgcttgttcgtgtgtgtgtcgttgcaggccttattcaagcttaccatgccgcgcgtggtcccggaccagcgctcgaaatttgaaaatgaagagttctttcgaaagctctcgcgcgagtgcgagatcaaatacacgggcttccgcgatcgcccgcacgaggaaaggcaagcgcgctttcaaaatgcctgtcgcgatggcaggagcgagatcgcgttcgtggccacgggcacgaacctgagcctgcaatttttcccggcctcgtggcagggcgagcaaaggcaaacgccctcgcgcgagtacgtggacttggaaagggaagcgggcaaggtctatctcaaggccccgatgatactcaatggcgtgtgcgtgatctggaaagggtggatagacttgcaaaggctcgatggcatgggctgtctcgagttcgacgaggaacgcgcgcaacaggaagatgccctggcccagcaagcgttcgaggaagcgcgcaggcgcacgcgcgagttcgaggacagagacaggagccaccgagaggaaatggaaccgttctcgacccaggacacggacctggacttggaaatgctcgcgccctatatcccgatggatgacgatttccagctcaggtaatgatgaggactagtccctgttcccagagcccacttttttttctttttttgaaataaaatagcctgtctttcagatctaaaaaaaaaaaaaaaaaaaaaaaaaaaaaaaaaaaaaaaaaaaaaaaaaaaaaaaaaaaaaaaaaaaaaaaaaaaaaaaaaaaaaaaaaaaaaaaaaaaa

SEQ ID NO: 1153 - RNA, 878 nt, synthetic construct
  misc_feature 1..878: note Artificial____CBFbeta(1-165)_Linker_HIF1alpha(549-575) mRNA opt11
  source 1..878: mol_type = other RNA
aggagagtcccgcagtcggcgtccagcggctctgcttgttcgtgtgtgtgtcgttgcaggccttattcaagcttaccatgccgcgcgtggtcccggaccagcgctcgaaatttgaaaatgaagagttctttcgaaagctatcgcgagagtgcgagatcaagtacacgggattccgcgatcgaccgcacgaggaaagacaagcgcgatttcaaaatgcatgtcgcgatggcaggagcgagatagcgttcgtggccacgggcacaaacttgagcttgcaattcttcccggcatcatggcagggcgagcaaaggcaaacaccctcgcgcgagtacgtggacttggaaagggaagcgggcaaggtctacctaaaggccccgatgatactcaatggagtgtgcgtgatctggaaagggtggatagacttacaaaggctcgatggcatgggatgtctcgagttcgatgaggaacgcgcgcaacaggaagatgccttggcacagcaagcgttcgaggaagcgcgcaggcgaacgcgcgagttcgaagacagagacaggagccatcgagaggaaatggaaggaggatcgggcggaagcgggggctcgggcgggagcgggggcggaccatttagcacgcaagataccgatctagatctcgagatgttggccccgtacatacccatggacgatgactttcaattgcgctagtgatgaggactagtccctgttcccagagcccacttttttttctttttttgaaataaaatagcctgtctttcagatctaaaaaaaaaaaaaaaaaaaaaaaaaaaaaaaaaaaaaaaaaaaaaaaaaaaaaaaaaaaaaaaaaaaaaaaaaaaaaaaaaaaaaaaaaaaaaaaaaaaa

SEQ ID NO: 1154 - RNA, 2513 nt, synthetic construct
  misc_feature 1..2513: note = Artificial____RUNX1(1-177)_N_RUNX1T1a(31-604) mRNA opt11
  source 1..2513: mol_type = other RNA
aggagagtcccgcagtcggcgtccagcggctctgcttgttcgtgtgtgtgtcgttgcaggccttattcaagcttaccatgcgcataccagtagatgcctccacctctcgccgcttcacacctccctcgacagccctcagccccggaaaaatgtccgaagcgctcccacttggcgcacccgacgcaggcgctgccctcgccggaaaactccgtagtggtgaccgctctatggtggaagtcttagccgaccaccccggagaactcgtaagaacagactccccaaacttcctctgctccgtgctacctacacactggcgctgcaacaaaaccctcccgattgccttcaaagtcgtagccctaggcgacgtccccgacggaaccctcgtcaccgtcatggcaggcaatgatgaaaactactccgcagaactccgcaacgccaccgctgcaatgaaaaaccaagtcgcacgattcaatgacctcagattcgtagggcgctccggccgagggaaatcattcaccctcacaatcacagtcttcaccaaccctccacaagtcgcaacataccaccgcgccatcaaaatcacagtcgacggaccccgagaaccccgcaatagaactgagaaacacagcaccatgcccgattcgccagtcgatgtcaaaacccaatcaaggctcaccccgcccacaatgcccccacccccaaccacacagggcgcaccccgcacctcttcattcacccctacaacactaacaaatggcacatcccacagtccaaccgcccttaatggcgccccatccccaccaaacggtttctccaacggcccctcctcttcatcatcatcctccctggctaaccaacaactcccacccgcatgcggagcacgacaactcagcaaactaaaacgattcctcaccactcttcaacaattcggcaacgacatatccccagaaataggcgaacgagtccgaaccctagtcctcggtctagtcaattccacgctcactatagaggagttccactccaaactacaagaagctaccaacttcccactccgaccattcgtcattccattcctcaaggcaaacctccctctgctccaacgtgaactcctacactgcgccagactcgccaagcaaaaccccgcacaatatcttgcccaacacgaacaacttctcttagacgcctccaccacatctcccgtcgactcatctgaacttctcctagatgttaacgaaaacggcaaacgcagaactcccgaccgcaccaaagaaaacgggttcgatagagaaccactacacagcgaacacccctctaaacgcccatgcaccatatctcctggccaacggtactcacctaacaacggtctctcataccaacccaatggcctcccacaccccaccccaccacccccacaacactaccgacttgacgacatggcgatcgcacaccactacagagactcttataggcacccatcccaccgcgatctccgcgaccgcaatcgccccatgggactacacggcactcgccaagaagaaatgatcgaccaccgactaaccgaccgtgaatgggcagaagaatggaaacacctcgaccacctcctaaattgcatcatggacatggtcgagaaaacaaggcgctcactcacggttctccgtcgctgccaagaagcagatcgtgaagaactgaactattggattcgacgatactcagacgccgaagacctcaagaaaggcggaggctcatctagctcccatagtcgccaacaatcacccgtaaacccggacccagtagccctcgacgctcaccgagagttcctacaccgtcccgcctccggatacgtacccgaagaaatatggaagaaagctgaagaagcagtaaacgaagtcaaacgccaagctatgaccgaactacaaaaagccgtaagcgaagctgaacgcaaagcacacgacatgatcactaccgaacgcgcaaaaatggaacgaaccgtcgcagaagccaaacgccaggccgccgaagacgcccttgctgtcataaatcagcaagaagactcctccgaatcctgctggaactgtggccgcaaagccagcgaaacctgctccggttgcaataccgcccgctactgcggttcattctgccagcacaaagactgggaaaaacaccaccacatctgcggtcaaaccctgcaagctcaacaacaaggcgacacccctgccgtctcatccagcgtaacccccaacagcggcgccggctccccaatggacaccccacccgcagccacaccccgatcaacaacacccggaacaccctcgactatcgaaaccacaccccgttagtgatgaggactagtccctgttcccagagcccacttttttttctttttttgaaataaaatagcctgtctttcagatctaaaaaaaaaaaaaaaaaaaaaaaaaaaaaaaaaaaaaaaaaaaaaaaaaaaaaaaaaaaaaaaaaaaaaaaaaaaaaaaaaaaaaaaaaaaaaaaaaaaa

SEQ ID NO: 1155 - RNA, 1028 nt, synthetic construct
  misc_feature 1..1028: note = Artificial____RUNX1(1-241)_RUNX1T1b(short) mRNA opt11
  source 1..1028: mol_type = other RNA
aggagagtcccgcagtcggcgtccagcggctctgcttgttcgtgtgtgtgtcgttgcaggccttattcaagcttaccatgcgcatcccagtcgacgcctccacctcccgccgcttcaccccaccctcaacagcactctcacccggcaaaatgtcagaagcactccctctcggagcacccgacgccggcgccgccctcgccggcaaactccgctcaggcgaccgatcaatggtcgaagtcctagccgaccaccccggagaactcgtccgcaccgactcacccaacttcctctgctccgtcctacccacccactggcgctgcaacaaaaccctccccatcgccttcaaagtcgtcgcactaggcgacgtcccagacggcaccctcgtcaccgtcatggccggcaacgacgaaaactactccgccgaactccgcaacgccacagcagccatgaaaaaccaagtcgcccgcttcaacgacctccgcttcgtaggccgctccggccgcggcaaatccttcaccctaaccatcacagtattcaccaatccaccccaagtcgccacctaccaccgcgctatcaaaatcaccgtcgacggcccccgcgaaccccgccgccaccgacaaaaactcgacgaccaaaccaaacccggctcactctccttctccgaacgcctctccgaactcgaacaactccgccgaacagccatgcgcgtctcaccccaccaccccgcccccacccccaacccccgagcctccctcaaccactcaaccgccttcaacccccaaccacaatcccaaatgcaagaagtcggcttctgccacgtagcccaagtcggtctcaaactcctcggctaatgatgaggactagtccctgttcccagagcccacttttttttctttttttgaaataaaatagcctgtctttcagatctaaaaaaaaaaaaaaaaaaaaaaaaaaaaaaaaaaaaaaaaaaaaaaaaaaaaaaaaaaaaaaaaaaaaaaaaaaaaaaaaaaaaaaaaaaaaaaaaaaaa

SEQ ID NO: 1156 - RNA, 2732 nt, synthetic construct
  misc_feature 1..2732: note = Artificial____RUNX1(1-241)_V_RUNX1T1b(22-604) mRNA opt11
  source 1..2732: mol_type = other RNA
aggagagtcccgcagtcggcgtccagcggctctgcttgttcgtgtgtgtgtcgttgcaggccttattcaagcttaccatgcgcatccccgtggacgcctcaacaagccgacgcttcacgcccccatccaccgccctatcccccggcaaaatgtcagaagccctccccctcggagccccagacgcaggggccgcactcgcaggcaaacttcgatccggggacaggagcatggtcgaagtcctagccgaccaccccggagagctagtccgaaccgactcccccaacttcctgtgctccgtactgccaacccactggcgatgtaacaaaacactccctatagcttttaaagtagtggccctaggagacgttccagacggcaccctcgtcaccgtcatggccggcaacgacgaaaactacagcgccgaactacgcaacgcaactgccgccatgaaaaatcaagtggccagattcaacgacctccgcttcgtcggccgcagcggaagaggaaaatcgttcaccttaaccatcacagttttcacaaacccaccccaggttgcaacatatcaccgagccatcaaaatcactgttgacggcccacgtgaaccaagacggcatcgtcaaaaactagacgaccaaacaaaaccaggttcactctcattttcagaacgcctctcagaactcgaacaactacgacgaaccgctatgcgcgtctcaccccaccaccccgccccgaccccgaacccacgagcatctctgaaccacagcacagccttcaacccacaaccacagtcccaaatgcaagttggacccgagaaacgagtcccagctatgccgggcagccccgtcgaggtcaaaatccaatcgcgcagcagccctcccacaatgcccccactaccacccatcaacccaggcggtccccgccccgtctcattcaccccaacagccctctcaaatggaatcaaccacagccctcccaccctcaacggtgccccctccccaccacaacgcttttcaaacggaccagcgtcctccacctccagcgctctcactaaccaacaactcccagcaacttgcggagccagacaactcagcaaactaaaaagattcctcaccaccctacaacagttcggaaacgacatctcccccgaaataggcgagaaagttcgcactcttgtactagcccttgtaaactccacagtaactatcgaagagttccactgcaaactacaagaagcaaccaacttcccactccgccccttcgtgatcccattcctaaaagcaaacctaccactactccaacgcgaactgctccactgcgcccgtgccgcaaaacagactccctcacaatacctcgcccaacatgaacatcttctcctcaacacatcaattgctagcccagcagactcatccgaacttctcatggaagtccacggaaacggtaaacgaccatctcccgaacgacgcgaagaaaactccttcgaccgcgacaccatcgcccccgaaccacccgccaaacgcgtatgcacaatatcaccggccccgcgccactcccctgcacttaccgtaccccttatgaacccagggggccaattccaccctacacccccacccctgcagcactacactctagaagacattgcaacaagccacctataccgagaacctaacaaaatgctagaacacagagaagtgcgtgaccgccaccacagcctcggcttaaacgggggctaccaagacgaactcgttgatcaccgcctcaccgaacgagagtgggcagatgaatggaaacacctggaccacgccctaaactgcatcatggaaatggtcgagaaaaccagacgatcaatggccgtcctaagaaggtgccaagaatcagacagagaagaactcaactattggaaacgacgatataacgaaaacaccgaactcagaaaaacaggcactgaactcgtctcgagacaacactcaccaggctctgcagactctctttccaacgactcacaacgcgagttcaatagccgaccaggcaccggctacgtccccgtcgaattttggaagaaaaccgaagaagccgtaaacaaagtcaaaatacaagcaatgtccgaagtccaaaaagccgtcgccgaagcagaacaaaaagccttcgaggttatcgcgaccgaacgcgcccgtatggaacagacaatagccgacgtcaaacgacaggctgccgaagacgctttcctcgttatcaacgaacaagaagaatcaactgaaaactgctggaactgcggccggaaagcgtccgaaacctgctcaggctgcaacatcgctcgttattgcggctccttttgccaacataaagactgggagcgccaccaccgcctatgcggccaaaacctacacggccaaagcccccacggacaaggccgacctctcctacccgtaggccgaggctcctccgcacgctccgccgactgcagcgtccccagccccgcactcgacaaaacttcggcaaccacatcccgcagcagcacccccgcgagcgttacagccatcgacacaaacggactataatgatgaggactagtccctgttcccagagcccacttttttttctttttttgaaataaaatagcctgtctttcagatctaaaaaaaaaaaaaaaaaaaaaaaaaaaaaaaaaaaaaaaaaaaaaaaaaaaaaaaaaaaaaaaaaaaaaaaaaaaaaaaaaaaaaaaaaaaaaaaaaaaa

SEQ ID NO: 1157 - RNA, 2732 nt, synthetic construct
  misc_feature 1..2732: note = Artificial____RUNX1(1-241)_I_RUNX1T1b(22-604) mRNA opt11
  source 1..2732: mol_type = other RNA
aggagagtcccgcagtcggcgtccagcggctctgcttgttcgtgtgtgtgtcgttgcaggccttattcaagcttaccatgaggatacccgtcgacgcctccacgtcacgccgcttcacacccccaagcaccgccctatcacccggcaaaatgtccgaagctctaccactaggtgcgccagacgcaggcgctgctctcgccggaaaactacgatccggggaccgatccatggtcgaagtcctcgctgatcaccccggcgaacttgtccgcacagactccccaaacttcctctgctccgtactcccgactcactggcgttgcaacaaaacacttcctattgcgttcaaggtcgtagccctaggggacgtccccgacggcaccttagtcacagtcatggcgggtaacgacgagaactactcagccgaattacgcaacgctacagcagccatgaaaaaccaggtagctcgcttcaacgacctccggttcgtcggtagaagcggccgaggaaaatcttttaccctcacaatcaccgtgttcaccaacccaccccaagtcgccacctaccaccgggcaatcaaaatcacagttgacggaccccgcgagccccgacgccatcgccaaaaacttgacgaccaaaccaaaccaggatcactatccttctcagagcgactctcagaactcgaacaattacgccggaccgcaatgcgtgtctcaccccaccacccggcccccacgcccaacccccgcgcctcactcaaccactccactgctttcaacccgcaaccccaatcccaaatgcagatcggcccagaaaaacgcgttcccgccatgccaggaagtcccgtcgaagtcaaaatccaatccagatcttccccaccaaccatgcctcccctcccgcccataaacccgggaggtccccgacccgtgtccttcacccccaccgccctctcgaacggcatcaaccactcaccacctaccctaaacggagcaccatccccaccccaacgcttctcaaacggacctgcatcctccacatcgtccgccctcaccaaccaacaactcccagccacatgcggcgcccgtcaactatctaagctaaaacgcttcctaaccactctccagcaatttggcaacgacatatcccccgaaatcggcgaaaaagtccgcacactcgtcttagccctcgtcaattccaccgtcaccatagaagagttccactgcaaactccaagaagccacaaacttcccactccgtccctttgtcatcccattcttaaaggcgaacctaccactactccaaagagaactactccactgcgctcgggccgcaaaacaaacccctagccagtacctagcccaacacgaacatctactactcaacactagcatcgcctcacccgcagactcatctgaactacttatggaagtccacggcaacggcaaacgcccctccccagaaaggcgcgaagaaaactccttcgatcgagacacaatagcacccgaaccacccgccaaacgcgtatgcaccatcagcccagcaccccgacactccccagccctcacggtccctctaatgaacccgggcggacaattccaccccaccccaccacccctacaacactacacattagaagacatagccacatctcacctctaccgcgaacccaataaaatgctggaacaccgcgaagtccgagatagacaccattctctaggactaaatggaggctaccaagacgaacttgtcgaccacagactcacagaacgcgaatgggccgacgaatggaagcacctcgatcatgcccttaactgtatcatggagatggtagagaaaacaagacgatccatggcagttctacgtcgatgccaagagagcgaccgcgaagaactcaactactggaaacgccgctacaacgaaaacacagaactacgaaaaaccggcaccgaactcgtctcccgtcagcactccccgggaagcgccgactcccttagcaacgactcacaacgcgagttcaactctcgccccggaacaggctacgttcctgtcgagttctggaagaaaactgaagaagccgtaaacaaagtcaaaatccaagccatgtcagaagtccaaaaagccgtagcagaagccgaacaaaaggctttcgaagtaattgcaaccgaacgcgcacgtatggaacaaaccatagcagatgtaaaaagacaagccgccgaagacgccttcctcgtcataaacgaacaagaagaatccaccgaaaactgttggaactgcggccgtaaagcctccgaaacatgttctggctgcaacattgcccgttactgtgggtccttctgccaacacaaagattgggaacgccaccaccgcctctgcggacaaaacctccacggccaaagcccccatggtcaaggtagaccactactacccgttggacgcggctccagcgcacgatcagccgactgctcagtgccatcccccgcccttgacaaaacctccgccacaacctcgcgatcatccacaccagcctcagtaacagccatagacaccaacgggctttgatgatgaggactagtccctgttcccagagcccacttttttttctttttttgaaataaaatagcctgtctttcagatctaaaaaaaaaaaaaaaaaaaaaaaaaaaaaaaaaaaaaaaaaaaaaaaaaaaaaaaaaaaaaaaaaaaaaaaaaaaaaaaaaaaaaaaaaaaaaaaaaaaa

SEQ ID NO: 1158 - RNA, 1639 nt, synthetic construct
  misc_feature 1..1639: note = Homo sapiens__Q01196-1__RUNX1(K83E_R174Q) mRNA wt
  source 1..1639: mol_type = other RNA
aggagagtcccgcagtcggcgtccagcggctctgcttgttcgtgtgtgtgtcgttgcaggccttattcaagcttaccatgcgtatccccgtagatgccagcacgagccgccgcttcacgccgccttccaccgcgctgagcccaggcaagatgagcgaggcgttgccgctgggcgccccggacgccggcgctgccctggccggcaagctgaggagcggcgaccgcagcatggtggaggtgctggccgaccacccgggcgagctggtgcgcaccgacagccccaacttcctctgctccgtgctgcctacgcactggcgctgcaacgagaccctgcccatcgctttcaaggtggtggccctaggggatgttccagatggcactctggtcactgtgatggctggcaatgatgaaaactactcggctgagctgagaaatgctaccgcagccatgaagaaccaggttgcaagatttaatgacctcaggtttgtcggtcgaagtggaagagggaaaagcttcactctgaccatcactgtcttcacaaacccaccgcaagtcgccacctaccacagagccatcaaaatcacagtggatgggccccaggaacctcgaagacatcggcagaaactagatgatcagaccaagcccgggagcttgtccttttccgagcggctcagtgaactggagcagctgcggcgcacagccatgagggtcagcccacaccacccagcccccacgcccaaccctcgtgcctccctgaaccactccactgcctttaaccctcagcctcagagtcagatgcaggatacaaggcagatccaaccatccccaccgtggtcctacgatcagtcctaccaatacctgggatccattgcctctccttctgtgcacccagcaacgcccatttcacctggacgtgccagcggcatgacaaccctctctgcagaactttccagtcgactctcaacggcacccgacctgacagcgttcagcgacccgcgccagttccccgcgctgccctccatctccgacccccgcatgcactatccaggcgccttcacctactccccgacgccggtcacctcgggcatcggcatcggcatgtcggccatgggctcggccacgcgctaccacacctacctgccgccgccctaccccggctcgtcgcaagcgcagggaggcccgttccaagccagctcgccctcctaccacctgtactacggcgcctcggccggctcctaccagttctccatggtgggcggcgagcgctcgccgccgcgcatcctgccgccctgcaccaacgcctccaccggctccgcgctgctcaaccccagcctcccgaaccagagcgacgtggtggaggccgagggcagccacagcaactcccccaccaacatggcgccctccgcgcgcctggaggaggccgtgtggaggccctactgaggactagtccctgttcccagagcccacttttttttctttttttgaaataaaatagcctgtctttcagatctcaaaggctcttttcagagccaccaaaaaaaaaaaaaaaaaaaaaaaaaaaaaaaaaaaaaaaaaaaaaaaaaaaaaaaaaaaaaaaaaaaaaaaaaaaaaaaaaaaaaaaaaaaaaaaaaaaaagaatt

SEQ ID NO: 1159 - RNA, 2113 nt, synthetic construct
  misc_feature 1..2113: note = Homo sapiens____CBFbeta(1-165)_SMMHC(1527-1972) mRNA wt
  source 1..2113: mol_type = other RNA
aggagagtcccgcagtcggcgtccagcggctctgcttgttcgtgtgtgtgtcgttgcaggccttattcaagcttaccatgccgcgcgtcgtgcccgaccagagaagcaagttcgagaacgaggagttttttaggaagctgagccgcgagtgtgagattaagtacacgggcttcagggaccggccccacgaggaacgccaggcacgcttccagaacgcctgccgcgacggccgctcggaaatcgcttttgtggccacaggaaccaatctgtctctccagttttttccggccagctggcagggagaacagcgacaaacacctagccgagagtatgtcgacttagaaagagaagcaggcaaggtatatttgaaggctcccatgattctgaatggagtctgtgttatctggaaaggctggattgatctccaaagactggatggtatgggctgtctggagtttgatgaggagcgagcccagcaggaggatgcattagcacaacaggcctttgaagaggctcggagaaggacacgcgaatttgaagatagagacaggtctcatcgggaggaaatggaggtccatgagctggagaagtccaagcgggccctggagacccagatggaggagatgaagacgcagctggaagagctggaggacgagctgcaagccacggaggacgccaaactgcggctggaagtcaacatgcaggcgctcaagggccagttcgaaagggatctccaagcccgggacgagcagaatgaggagaagaggaggcaactgcagagacagcttcacgagtatgagacggaactggaagacgagcgaaagcaacgtgccctggcagctgcagcaaagaagaagctggaaggggacctgaaagacctggagcttcaggccgactctgccatcaaggggagggaggaagccatcaagcagctacgcaaactgcaggctcagatgaaggactttcaaagagagctggaagatgcccgtgcctccagagatgagatctttgccacagccaaagagaatgagaagaaagccaagagcttggaagcagacctcatgcagctacaagaggacctcgccgccgctgagagggctcgcaaacaagcggacctcgagaaggaggaactggcagaggagctggccagtagcctgtcgggaaggaacgcactccaggacgagaagcgccgcctggaggcccggatcgcccagctggaggaggagctggaggaggagcagggcaacatggaggccatgagcgaccgggtccgcaaagccacacagcaggccgagcagctcagcaacgagctggccacagagcgcagcacggcccagaagaatgagagtgcccggcagcagctcgagcggcagaacaaggagctccggagcaagctccacgagatggagggggccgtcaagtccaagttcaagtccaccatcgcggcgctggaggccaagattgcacagctggaggagcaggtcgagcaggaggccagagagaaacaggcggccaccaagtcgctgaagcagaaagacaagaagctgaaggaaatcttgctgcaggtggaggacgagcgcaagatggccgagcagtacaaggagcaggcagagaaaggcaatgccagggtcaagcagctcaagaggcagctggaggaggcagaggaggagtcccagcgcatcaacgccaaccgcaggaagctgcagcgggagctggatgaggccacggagagcaacgaggccatgggccgcgaggtgaacgcactcaagagcaagctcaggcgaggaaacgagacctctttcgttccttctagaaggtctggaggacgtagagttattgaaaatgcagatggttctgaggaggaaacggacactcgagacgcagacttcaatggaaccaaggccagtgaatgaggactagtccctgttcccagagcccacttttttttctttttttgaaataaaatagcctgtctttcagatctcaaaggctcttttcagagccaccaaaaaaaaaaaaaaaaaaaaaaaaaaaaaaaaaaaaaaaaaaaaaaaaaaaaaaaaaaaaaaaaaaaaaaaaaaaaaaaaaaaaaaaaaaaaaaaaaaaaagaatt

SEQ ID NO: 1160 - RNA, 1828 nt, synthetic construct
  misc_feature 1..1828: note = Artificial____CBFbeta(1-165)_SMMHC(1527-1877) mRNA wt
  source 1..1828: mol_type = other RNA
aggagagtcccgcagtcggcgtccagcggctctgcttgttcgtgtgtgtgtcgttgcaggccttattcaagcttaccatgccgcgcgtcgtgcccgaccagagaagcaagttcgagaacgaggagttttttaggaagctgagccgcgagtgtgagattaagtacacgggcttcagggaccggccccacgaggaacgccaggcacgcttccagaacgcctgccgcgacggccgctcggaaatcgcttttgtggccacaggaaccaatctgtctctccagttttttccggccagctggcagggagaacagcgacaaacacctagccgagagtatgtcgacttagaaagagaagcaggcaaggtatatttgaaggctcccatgattctgaatggagtctgtgttatctggaaaggctggattgatctccaaagactggatggtatgggctgtctggagtttgatgaggagcgagcccagcaggaggatgcattagcacaacaggcctttgaagaggctcggagaaggacacgcgaatttgaagatagagacaggtctcatcgggaggaaatggaggtccatgagctggagaagtccaagcgggccctggagacccagatggaggagatgaagacgcagctggaagagctggaggacgagctgcaagccacggaggacgccaaactgcggctggaagtcaacatgcaggcgctcaagggccagttcgaaagggatctccaagcccgggacgagcagaatgaggagaagaggaggcaactgcagagacagcttcacgagtatgagacggaactggaagacgagcgaaagcaacgtgccctggcagctgcagcaaagaagaagctggaaggggacctgaaagacctggagcttcaggccgactctgccatcaaggggagggaggaagccatcaagcagctacgcaaactgcaggctcagatgaaggactttcaaagagagctggaagatgcccgtgcctccagagatgagatctttgccacagccaaagagaatgagaagaaagccaagagcttggaagcagacctcatgcagctacaagaggacctcgccgccgctgagagggctcgcaaacaagcggacctcgagaaggaggaactggcagaggagctggccagtagcctgtcgggaaggaacgcactccaggacgagaagcgccgcctggaggcccggatcgcccagctggaggaggagctggaggaggagcagggcaacatggaggccatgagcgaccgggtccgcaaagccacacagcaggccgagcagctcagcaacgagctggccacagagcgcagcacggcccagaagaatgagagtgcccggcagcagctcgagcggcagaacaaggagctccggagcaagctccacgagatggagggggccgtcaagtccaagttcaagtccaccatcgcggcgctggaggccaagattgcacagctggaggagcaggtcgagcaggaggccagagagaaacaggcggccaccaagtcgctgaagcagaaagacaagaagctgaaggaaatcttgctgcaggtggaggacgagcgcaagatggccgagcagtacaaggagcaggcagagaaaggcaatgcctgaggactagtccctgttcccagagcccacttttttttctttttttgaaataaaatagcctgtctttcagatctcaaaggctcttttcagagccaccaaaaaaaaaaaaaaaaaaaaaaaaaaaaaaaaaaaaaaaaaaaaaaaaaaaaaaaaaaaaaaaaaaaaaaaaaaaaaaaaaaaaaaaaaaaaaaaaaaaaagaatt

SEQ ID NO: 1161 - RNA, 889 nt, synthetic construct
  misc_feature 1..889: note = Artificial____CBFbeta(1-165)_Linker_Lifeact mRNA wt
  source 1..889: mol_type = other RNA
aggagagtcccgcagtcggcgtccagcggctctgcttgttcgtgtgtgtgtcgttgcaggccttattcaagcttaccatgccgcgcgtcgtgcccgaccagagaagcaagttcgagaacgaggagttttttaggaagctgagccgcgagtgtgagattaagtacacgggcttcagggaccggccccacgaggaacgccaggcacgcttccagaacgcctgccgcgacggccgctcggaaatcgcttttgtggccacaggaaccaatctgtctctccagttttttccggccagctggcagggagaacagcgacaaacacctagccgagagtatgtcgacttagaaagagaagcaggcaaggtatatttgaaggctcccatgattctgaatggagtctgtgttatctggaaaggctggattgatctccaaagactggatggtatgggctgtctggagtttgatgaggagcgagcccagcaggaggatgcattagcacaacaggcctttgaagaggctcggagaaggacacgcgaatttgaagatagagacaggtctcatcgggaggaaatggagggcgggagcggcgggtccggcgggagcggcggctccgggggcgggggcgtggccgacctgatcaagaagttcgagagcatcagcaaggaggagggggatccaccggtcgccacctgaggactagtccctgttcccagagcccacttttttttctttttttgaaataaaatagcctgtctttcagatctcaaaggctcttttcagagccaccaaaaaaaaaaaaaaaaaaaaaaaaaaaaaaaaaaaaaaaaaaaaaaaaaaaaaaaaaaaaaaaaaaaaaaaaaaaaaaaaaaaaaaaaaaaaaaaaaaaaagaatt

SEQ ID NO: 1162 - RNA, 856 nt, synthetic construct
  misc_feature 1..856: note = Artificial____CBFbeta(1-165)_HIF1alpha(549-575) mRNA wt
  source 1..856: mol_type = other RNA
aggagagtcccgcagtcggcgtccagcggctctgcttgttcgtgtgtgtgtcgttgcaggccttattcaagcttaccatgccgcgcgtcgtgcccgaccagagaagcaagttcgagaacgaggagttttttaggaagctgagccgcgagtgtgagattaagtacacgggcttcagggaccggccccacgaggaacgccaggcacgcttccagaacgcctgccgcgacggccgctcggaaatcgcttttgtggccacaggaaccaatctgtctctccagttttttccggccagctggcagggagaacagcgacaaacacctagccgagagtatgtcgacttagaaagagaagcaggcaaggtatatttgaaggctcccatgattctgaatggagtctgtgttatctggaaaggctggattgatctccaaagactggatggtatgggctgtctggagtttgatgaggagcgagcccagcaggaggatgcattagcacaacaggcctttgaagaggctcggagaaggacacgcgaatttgaagatagagacaggtctcatcgggaggaaatggagccattttctactcaggacacagatttagacttggagatgttagctccctatatcccaatggatgatgacttccagttacgttgaggactagtccctgttcccagagcccacttttttttctttttttgaaataaaatagcctgtctttcagatctcaaaggctcttttcagagccaccaaaaaaaaaaaaaaaaaaaaaaaaaaaaaaaaaaaaaaaaaaaaaaaaaaaaaaaaaaaaaaaaaaaaaaaaaaaaaaaaaaaaaaaaaaaaaaaaaaaaagaatt

SEQ ID NO: 1163 - RNA, 901 nt, synthetic construct
  misc_feature 1..901: note Artificial____CBFbeta(1-165)_Linker_HIF1alpha(549-575) mRNA wt
  source 1..901: mol_type = other RNA
aggagagtcccgcagtcggcgtccagcggctctgcttgttcgtgtgtgtgtcgttgcaggccttattcaagcttaccatgccgcgcgtcgtgcccgaccagagaagcaagttcgagaacgaggagttttttaggaagctgagccgcgagtgtgagattaagtacacgggcttcagggaccggccccacgaggaacgccaggcacgcttccagaacgcctgccgcgacggccgctcggaaatcgcttttgtggccacaggaaccaatctgtctctccagttttttccggccagctggcagggagaacagcgacaaacacctagccgagagtatgtcgacttagaaagagaagcaggcaaggtatatttgaaggctcccatgattctgaatggagtctgtgttatctggaaaggctggattgatctccaaagactggatggtatgggctgtctggagtttgatgaggagcgagcccagcaggaggatgcattagcacaacaggcctttgaagaggctcggagaaggacacgcgaatttgaagatagagacaggtctcatcgggaggaaatggagggcgggagcggcgggtccggcgggagcggcggctccgggggcgggccattttctactcaggacacagatttagacttggagatgttagctccctatatcccaatggatgatgacttccagttacgttgaggactagtccctgttcccagagcccacttttttttctttttttgaaataaaatagcctgtctttcagatctcaaaggctcttttcagagccaccaaaaaaaaaaaaaaaaaaaaaaaaaaaaaaaaaaaaaaaaaaaaaaaaaaaaaaaaaaaaaaaaaaaaaaaaaaaaaaaaaaaaaaaaaaaaaaaaaaaaagaatt

SEQ ID NO: 1164 - RNA, 2536 nt, synthetic construct
  misc_feature 1..2536: note = Artificial____RUNX1(1-177)_N_RUNX1T1a(31-604) mRNA wt
  source 1..2536: mol_type = other RNA
aggagagtcccgcagtcggcgtccagcggctctgcttgttcgtgtgtgtgtcgttgcaggccttattcaagcttaccatgcgtatccccgtagatgccagcacgagccgccgcttcacgccgccttccaccgcgctgagcccaggcaagatgagcgaggcgttgccgctgggcgccccggacgccggcgctgccctggccggcaagctgaggagcggcgaccgcagcatggtggaggtgctggccgaccacccgggcgagctggtgcgcaccgacagccccaacttcctctgctccgtgctgcctacgcactggcgctgcaacaagaccctgcccatcgctttcaaggtggtggccctaggggatgttccagatggcactctggtcactgtgatggctggcaatgatgaaaactactcggctgagctgagaaatgctaccgcagccatgaagaaccaggttgcaagatttaatgacctcaggtttgtcggtcgaagtggaagagggaaaagcttcactctgaccatcactgtcttcacaaacccaccgcaagtcgccacctaccacagagccatcaaaatcacagtggatgggccccgagaacctcgaaaccgtactgagaagcactccacaatgccagactcacctgtggatgtgaagacgcaatctaggctgactcctccaacaatgccacctcccccaactactcaaggagctccaagaaccagttcatttacaccgacaacgttaactaatggcacgagccattctcctacagccttgaatggcgccccctcaccacccaatggcttcagcaatgggccttcctcttcttcctcctcctctctggctaatcaacagctgcccccagcctgtggtgccaggcaactcagcaagctgaaaaggttccttactaccctgcagcagtttggcaatgacatttcacccgagataggagaaagagttcgcaccctcgttctgggactagtgaactccactttgacaattgaagaatttcattccaaactgcaagaagctactaacttcccactgagaccttttgtcatcccatttttgaaggccaacttgcccctgctgcagcgtgagctcctccactgcgcaagactggccaaacagaaccctgcccagtacctcgcccagcatgaacagctgcttctggatgccagcaccacctcacctgttgactcctcagagctgcttctcgatgtgaacgaaaacgggaagaggcgaactccagacagaaccaaagaaaatggctttgacagagagcctttgcactcagaacatccaagcaagcgaccatgcactattagcccaggccagcggtacagtccaaataacggcttatcctaccagcccaatggcctgcctcaccctaccccacctccacctcagcattaccgtttggatgatatggccattgcccaccactacagggactcctatcgacaccccagccacagggacctcagggacagaaacagacctatggggttgcatggcacacgtcaagaagaaatgattgatcacagactaacagacagagaatgggcagaagagtggaaacatcttgaccatctgttaaactgcataatggacatggtagaaaaaacaaggcgatctctcaccgtactaaggcggtgtcaagaagcagaccgggaagaattgaattactggatccggcggtacagtgacgccgaggacttaaaaaaaggtggcggcagtagcagcagccactctaggcagcagagtcccgtcaacccagacccagttgcactagacgcgcatcgggaattccttcacaggcctgcgtctggatacgtgccagaggagatctggaagaaagctgaggaggccgtcaatgaggtgaagcgccaggcgatgacggagctgcagaaggccgtgtctgaggcggagcggaaagcccacgacatgatcacaacagagagggccaagatggagcgcacggtcgccgaggccaaacggcaggcggcggaggacgcactggcagttatcaatcagcaggaggattcaagcgagagttgctggaattgtggccgtaaagcgagtgaaacctgcagtggctgtaacacagcccgatactgtggctcattttgccagcacaaagactgggagaagcaccatcacatctgtggacagaccctgcaggcccagcagcagggagacacacctgcagtcagctcctctgtcacgcccaacagcggggctgggagcccgatggacacaccaccagcagccactccgaggtcaaccaccccgggaaccccttccaccatagagacaacccctcgctgaggactagtccctgttcccagagcccacttttttttctttttttgaaataaaatagcctgtctttcagatctcaaaggctcttttcagagccaccaaaaaaaaaaaaaaaaaaaaaaaaaaaaaaaaaaaaaaaaaaaaaaaaaaaaaaaaaaaaaaaaaaaaaaaaaaaaaaaaaaaaaaaaaaaaaaaaaaaaagaatt

SEQ ID NO: 1165 - RNA, 1051 nt, synthetic construct
  misc_feature 1..1051: note = Artificial____RUNX1(1-241)_RUNX1T1b(short) mRNA wt
  source 1..1051: mol_type = other RNA
aggagagtcccgcagtcggcgtccagcggctctgcttgttcgtgtgtgtgtcgttgcaggccttattcaagcttaccatgcgtatccccgtagatgccagcacgagccgccgcttcacgccgccttccaccgcgctgagcccaggcaagatgagcgaggcgttgccgctgggcgccccggacgccggcgctgccctggccggcaagctgaggagcggcgaccgcagcatggtggaggtgctggccgaccacccgggcgagctggtgcgcaccgacagccccaacttcctctgctccgtgctgcctacgcactggcgctgcaacaagaccctgcccatcgctttcaaggtggtggccctaggggatgttccagatggcactctggtcactgtgatggctggcaatgatgaaaactactcggctgagctgagaaatgctaccgcagccatgaagaaccaggttgcaagatttaatgacctcaggtttgtcggtcgaagtggaagagggaaaagcttcactctgaccatcactgtcttcacaaacccaccgcaagtcgccacctaccacagagccatcaaaatcacagtggatgggccccgagaacctcgaagacatcggcagaaactagatgatcagaccaagcccgggagcttgtccttttccgagcggctcagtgaactggagcagctgcggcgcacagccatgagggtcagcccacaccacccagcccccacgcccaaccctcgtgcctccctgaaccactccactgcctttaaccctcagcctcagagtcagatgcaggaggtgggcttctgccacgtcgcccaggtggggctgaagctcctgggctgaggactagtccctgttcccagagcccacttttttttctttttttgaaataaaatagcctgtctttcagatctcaaaggctcttttcagagccaccaaaaaaaaaaaaaaaaaaaaaaaaaaaaaaaaaaaaaaaaaaaaaaaaaaaaaaaaaaaaaaaaaaaaaaaaaaaaaaaaaaaaaaaaaaaaaaaaaaaaagaatt

SEQ ID NO: 1166 - RNA, 2755 nt, synthetic construct
  misc_feature 1..2755: note = Artificial____RUNX1(1-241)_V_RUNX1T1b(22-604) mRNA wt
  source 1..2755: mol_type = other RNA
aggagagtcccgcagtcggcgtccagcggctctgcttgttcgtgtgtgtgtcgttgcaggccttattcaagcttaccatgcgtatccccgtagatgccagcacgagccgccgcttcacgccgccttccaccgcgctgagcccaggcaagatgagcgaggcgttgccgctgggcgccccggacgccggcgctgccctggccggcaagctgaggagcggcgaccgcagcatggtggaggtgctggccgaccacccgggcgagctggtgcgcaccgacagccccaacttcctctgctccgtgctgcctacgcactggcgctgcaacaagaccctgcccatcgctttcaaggtggtggccctaggggatgttccagatggcactctggtcactgtgatggctggcaatgatgaaaactactcggctgagctgagaaatgctaccgcagccatgaagaaccaggttgcaagatttaatgacctcaggtttgtcggtcgaagtggaagagggaaaagcttcactctgaccatcactgtcttcacaaacccaccgcaagtcgccacctaccacagagccatcaaaatcacagtggatgggccccgagaacctcgaagacatcggcagaaactagatgatcagaccaagcccgggagcttgtccttttccgagcggctcagtgaactggagcagctgcggcgcacagccatgagggtcagcccacaccacccagcccccacgcccaaccctcgtgcctccctgaaccactccactgcctttaaccctcagcctcagagtcagatgcaggtgggtcctgagaaaagggtgccagcgatgcctggatcgcctgtggaagtgaagatacagtccagatcctcacctcccaccatgccacccctcccaccaataaatcctggaggaccgaggccagtgtccttcactcctactgcattaagcaatggcatcaaccattctcctcctaccctgaatggtgccccatcaccgccacagagattcagcaatggtcctgcctcctccacatcatctgcactcacaaatcagcaattgccagccacttgtggtgctcgacaactcagcaagttgaaacgctttcttaccactctgcaacagtttggcaatgacatctcccctgagattggggagaaggtgcggactcttgttcttgcactggtgaactcaacagtgacaattgaggaattccactgtaagctccaagaagccacaaactttccccttcgtccttttgtgattccatttctcaaggccaacctgcccctgctgcagcgggaactgctgcactgcgctcgggcggccaagcagaccccatcccagtacctggctcagcacgaacaccttctgctcaacacaagcattgcatcgcctgctgactcgtcagagttgctcatggaggtgcacggaaatgggaagaggcccagtccagagaggagagaagagaatagttttgatagagacacaattgctcctgagcctcctgccaagagagtatgtaccatcagccctgctcctcggcacagtcctgctctcactgtgcccctcatgaatcccgggggccaattccatcctacccctccacctcttcagcattacaccttagaggatattgcaacttctcacctgtatcgggaacccaacaagatgctagagcatcgagaagttcgtgatagacaccacagtcttggtctaaatggaggctatcaagatgagttggtagatcatcgtttgacagaaagggaatgggctgatgaatggaaacatcttgaccatgcgctgaattgcattatggaaatggtagagaaaacaaggcgctctatggcagttctgcggcgctgtcaggaatcagatcgtgaagaactcaactactggaaaagacggtacaatgaaaacacagagctgaggaaaacggggaccgagttggtctccaggcagcacagccctgggagtgcagattctctcagcaatgattctcagagagagttcaacagcaggccaggtacaggatacgtacctgtggagttttggaaaaaaacagaagaagctgtgaataaggtgaaaattcaggccatgtcagaagtacagaaggccgtcgctgaggcagagcagaaagcctttgaagtgattgcaacagagagagcacgaatggagcaaaccatagcggatgtcaagcggcaggccgcagaggatgctttcctcgtcatcaatgagcaagaggagtccacggagaactgctggaactgtggccgcaaagccagcgagacatgcagtggctgcaatatcgcgcgatactgtggctctttctgccagcacaaggactgggagcggcaccaccgcctctgtggtcagaacctgcatggccagagcccccacggccagggccggccgctgcttcctgtaggcaggggctcctctgccaggtccgccgactgcagcgtgcccagcccagccctcgacaagacctcggcaaccacatcgcgttcctcaacacctgcttctgtgacagctatcgacaccaacggactctgaggactagtccctgttcccagagcccacttttttttctttttttgaaataaaatagcctgtctttcagatctcaaaggctcttttcagagccaccaaaaaaaaaaaaaaaaaaaaaaaaaaaaaaaaaaaaaaaaaaaaaaaaaaaaaaaaaaaaaaaaaaaaaaaaaaaaaaaaaaaaaaaaaaaaaaaaaaaaagaatt

SEQ ID NO: 1167 - RNA, 2755 nt, synthetic construct
  misc_feature 1..2755: note = Artificial____RUNX1(1-241)_I_RUNX1T1b(22-604) mRNA wt
  source 1..2755: mol_type = other RNA
aggagagtcccgcagtcggcgtccagcggctctgcttgttcgtgtgtgtgtcgttgcaggccttattcaagcttaccatgcgtatccccgtagatgccagcacgagccgccgcttcacgccgccttccaccgcgctgagcccaggcaagatgagcgaggcgttgccgctgggcgccccggacgccggcgctgccctggccggcaagctgaggagcggcgaccgcagcatggtggaggtgctggccgaccacccgggcgagctggtgcgcaccgacagccccaacttcctctgctccgtgctgcctacgcactggcgctgcaacaagaccctgcccatcgctttcaaggtggtggccctaggggatgttccagatggcactctggtcactgtgatggctggcaatgatgaaaactactcggctgagctgagaaatgctaccgcagccatgaagaaccaggttgcaagatttaatgacctcaggtttgtcggtcgaagtggaagagggaaaagcttcactctgaccatcactgtcttcacaaacccaccgcaagtcgccacctaccacagagccatcaaaatcacagtggatgggccccgagaacctcgaagacatcggcagaaactagatgatcagaccaagcccgggagcttgtccttttccgagcggctcagtgaactggagcagctgcggcgcacagccatgagggtcagcccacaccacccagcccccacgcccaaccctcgtgcctccctgaaccactccactgcctttaaccctcagcctcagagtcagatgcagatcggtcctgagaaaagggtgccagcgatgcctggatcgcctgtggaagtgaagatacagtccagatcctcacctcccaccatgccacccctcccaccaataaatcctggaggaccgaggccagtgtccttcactcctactgcattaagcaatggcatcaaccattctcctcctaccctgaatggtgccccatcaccgccacagagattcagcaatggtcctgcctcctccacatcatctgcactcacaaatcagcaattgccagccacttgtggtgctcgacaactcagcaagttgaaacgctttcttaccactctgcaacagtttggcaatgacatctcccctgagattggggagaaggtgcggactcttgttcttgcactggtgaactcaacagtgacaattgaggaattccactgtaagctccaagaagccacaaactttccccttcgtccttttgtgattccatttctcaaggccaacctgcccctgctgcagcgggaactgctgcactgcgctcgggcggccaagcagaccccatcccagtacctggctcagcacgaacaccttctgctcaacacaagcattgcatcgcctgctgactcgtcagagttgctcatggaggtgcacggaaatgggaagaggcccagtccagagaggagagaagagaatagttttgatagagacacaattgctcctgagcctcctgccaagagagtatgtaccatcagccctgctcctcggcacagtcctgctctcactgtgcccctcatgaatcccgggggccaattccatcctacccctccacctcttcagcattacaccttagaggatattgcaacttctcacctgtatcgggaacccaacaagatgctagagcatcgagaagttcgtgatagacaccacagtcttggtctaaatggaggctatcaagatgagttggtagatcatcgtttgacagaaagggaatgggctgatgaatggaaacatcttgaccatgcgctgaattgcattatggaaatggtagagaaaacaaggcgctctatggcagttctgcggcgctgtcaggaatcagatcgtgaagaactcaactactggaaaagacggtacaatgaaaacacagagctgaggaaaacggggaccgagttggtctccaggcagcacagccctgggagtgcagattctctcagcaatgattctcagagagagttcaacagcaggccaggtacaggatacgtacctgtggagttttggaaaaaaacagaagaagctgtgaataaggtgaaaattcaggccatgtcagaagtacagaaggccgtcgctgaggcagagcagaaagcctttgaagtgattgcaacagagagagcacgaatggagcaaaccatagcggatgtcaagcggcaggccgcagaggatgctttcctcgtcatcaatgagcaagaggagtccacggagaactgctggaactgtggccgcaaagccagcgagacatgcagtggctgcaatatcgcgcgatactgtggctctttctgccagcacaaggactgggagcggcaccaccgcctctgtggtcagaacctgcatggccagagcccccacggccagggccggccgctgcttcctgtaggcaggggctcctctgccaggtccgccgactgcagcgtgcccagcccagccctcgacaagacctcggcaaccacatcgcgttcctcaacacctgcttctgtgacagctatcgacaccaacggactctgaggactagtccctgttcccagagcccacttttttttctttttttgaaataaaatagcctgtctttcagatctcaaaggctcttttcagagccaccaaaaaaaaaaaaaaaaaaaaaaaaaaaaaaaaaaaaaaaaaaaaaaaaaaaaaaaaaaaaaaaaaaaaaaaaaaaaaaaaaaaaaaaaaaaaaaaaaaaaagaatt

SEQ ID NO: 1168 - RNA, 1639 nt, synthetic construct
  misc_feature 1..1639: note = Homo sapiens__Q01196-1__RUNX1(K83E_R174Q) mRNA wt mod
  source 1..1639: mol_type = other RNA
aggagagtcccgcagtcggcgtccagcggctctgcttgttcgtgtgtgtgtcgttgcaggccttattcaagcttaccatgcgtatccccgtagatgccagcacgagccgccgcttcacgccgccttccaccgcgctgagcccaggcaagatgagcgaggcgttgccgctgggcgccccggacgccggcgctgccctggccggcaagctgaggagcggcgaccgcagcatggtggaggtgctggccgaccacccgggcgagctggtgcgcaccgacagccccaacttcctctgctccgtgctgcctacgcactggcgctgcaacgagaccctgcccatcgctttcaaggtggtggccctaggggatgttccagatggcactctggtcactgtgatggctggcaatgatgaaaactactcggctgagctgagaaatgctaccgcagccatgaagaaccaggttgcaagatttaatgacctcaggtttgtcggtcgaagtggaagagggaaaagtttcactctgaccatcactgtcttcacaaacccaccgcaagtcgccacctaccacagagccatcaaaatcacagtggatgggccccaggaacctcgaagacatcggcagaaactagatgatcagaccaagcccgggagcttgtccttttccgagcggctcagtgaactggagcagctgcggcgcacagccatgagggtcagcccacaccacccagcccccacgcccaaccctcgtgcctccctgaaccactccactgcctttaaccctcagcctcagagtcagatgcaggatacaaggcagatccaaccatccccaccgtggtcctacgatcagtcctaccaatacctgggatccattgcctctccttctgtgcacccagcaacgcccatttcacctggacgtgccagcggcatgacaaccctctctgcagaactttccagtcgactctcaacggcacccgacctgacagcgttcagcgacccgcgccagttccccgcgctgccctccatctccgacccccgcatgcactatccaggcgccttcacctactccccgacgccggtcacctcgggcatcggcatcggcatgtcggccatgggctcggccacgcgctaccacacctacctgccgccgccctaccccggctcgtcgcaagcgcagggaggcccgttccaagccagctcgccctcctaccacctgtactacggcgcctcggccggctcctaccagttctccatggtgggcggcgagcgctcgccgccgcgcatcctgccgccctgcaccaacgcctccaccggctccgcgctgctcaaccccagcctcccgaaccagagcgacgtggtggaggccgagggcagccacagcaactcccccaccaacatggcgccctccgcgcgcctggaggaggccgtgtggaggccctactgaggactagtccctgttcccagagcccacttttttttctttttttgaaataaaatagcctgtctttcagatctcaaaggctcttttcagagccaccaaaaaaaaaaaaaaaaaaaaaaaaaaaaaaaaaaaaaaaaaaaaaaaaaaaaaaaaaaaaaaaaaaaaaaaaaaaaaaaaaaaaaaaaaaaaaaaaaaaaagaatt

SEQ ID NO: 1169 - RNA, 2113 nt, synthetic construct
  misc_feature 1..2113: note = Homo sapiens____CBFbeta(1-165)_SMMHC(1527-1972) mRNA wt mod
  source 1..2113: mol_type = other RNA
aggagagtcccgcagtcggcgtccagcggctctgcttgttcgtgtgtgtgtcgttgcaggccttattcaagcttaccatgccgcgcgtcgtgcccgaccagagaagcaagtttgagaacgaggagttctttaggaagctgagccgcgagtgtgagattaagtacacgggctttagggaccggccccacgaggaacgccaggcacgcttccagaacgcctgccgcgacggccgctcggaaatcgcttttgtggccacaggaaccaatctgtctctccagttctttccggccagctggcagggagaacagcgacaaacacctagccgagagtatgtcgacttagaaagagaagcaggcaaggtatatttgaaggctcccatgattctgaatggagtctgtgttatctggaaaggctggattgatctccaaagactggatggtatgggctgtctggagtttgatgaggagcgagcccagcaggaggatgcattagcacaacaggcctttgaagaggctcggagaaggacacgcgaatttgaagatagagacaggtctcatcgggaggaaatggaggtccatgagctggagaagtccaagcgggccctggagacccagatggaggagatgaagacgcagctggaggaactggaggacgagctgcaagccacggaggacgccaaactgcggctggaagtcaacatgcaggcgctcaagggccagttcgaaagggatctccaagcccgggacgagcagaatgaggagaagaggaggcaactgcagagacagcttcacgagtatgagacggaactggaagacgagcgaaagcaacgtgccctggcagctgcagcaaagaagaagctggaaggggacctgaaagacctggagcttcaggccgactctgccatcaaggggagggaggaagccatcaagcagctacgcaaactgcaggctcagatgaaggactttcaaagagagctggaagatgcccgtgcctccagagatgagatctttgccacagccaaagagaatgagaagaaagccaagagcttggaagcagacctcatgcagctacaagaggacctcgccgccgctgagagggctcgcaaacaagcggacctcgagaaggaggaactggcagaggagctggccagtagcctgtcgggaaggaacgcactccaggacgagaagcgccgcctggaggcccggatcgcccagctggaggaggagctggaggaggagcagggcaacatggaggccatgagcgaccgggtccgcaaagccacacagcaggccgagcagctcagcaacgagctggccacagagcgcagcacggcccagaagaatgagagtgcccggcagcagctcgagcggcagaacaaggagctccggagcaagctccacgagatggagggggccgtcaagtccaagttcaagtccaccatcgcggcgctggaggccaagattgcacagctggaggagcaggtcgagcaggaggccagagagaaacaggcggccaccaagtcgctgaagcagaaagacaagaagctgaaggaaatcttgctccaggtggaggacgagcgcaagatggccgagcagtacaaggagcaggcagagaaaggcaatgccagggtcaagcagctgaagaggcagctggaggaggcagaggaggagtcccagcgcatcaacgccaaccgcaggaagctgcagcgggagctggatgaggccacggagagcaacgaggccatgggccgcgaggtgaacgcactcaagagcaagctcaggcgaggaaacgagacctctttcgttccttctagaaggtctggaggacgtagagttattgaaaatgcagatggttctgaggaggaaacggacactcgagacgcagacttcaatggaaccaaggccagtgaatgaggactagtccctgttcccagagcccacttttttttctttttttgaaataaaatagcctgtctttcagatctcaaaggctcttttcagagccaccaaaaaaaaaaaaaaaaaaaaaaaaaaaaaaaaaaaaaaaaaaaaaaaaaaaaaaaaaaaaaaaaaaaaaaaaaaaaaaaaaaaaaaaaaaaaaaaaaaaaagaatt

SEQ ID NO: 1170 - RNA, 1828 nt, synthetic construct
  misc_feature 1..1828: note = Artificial____CBFbeta(1-165)_SMMHC(1527-1877) mRNA wt mod
  source 1..1828: mol_type = other RNA
aggagagtcccgcagtcggcgtccagcggctctgcttgttcgtgtgtgtgtcgttgcaggccttattcaagcttaccatgccgcgcgtcgtgcccgaccagagaagcaagtttgagaacgaggagttctttaggaagctgagccgcgagtgtgagattaagtacacgggctttagggaccggccccacgaggaacgccaggcacgcttccagaacgcctgccgcgacggccgctcggaaatcgcttttgtggccacaggaaccaatctgtctctccagttctttccggccagctggcagggagaacagcgacaaacacctagccgagagtatgtcgacttagaaagagaagcaggcaaggtatatttgaaggctcccatgattctgaatggagtctgtgttatctggaaaggctggattgatctccaaagactggatggtatgggctgtctggagtttgatgaggagcgagcccagcaggaggatgcattagcacaacaggcctttgaagaggctcggagaaggacacgcgaatttgaagatagagacaggtctcatcgggaggaaatggaggtccatgagctggagaagtccaagcgggccctggagacccagatggaggagatgaagacgcagctggaggaactggaggacgagctgcaagccacggaggacgccaaactgcggctggaagtcaacatgcaggcgctcaagggccagttcgaaagggatctccaagcccgggacgagcagaatgaggagaagaggaggcaactgcagagacagcttcacgagtatgagacggaactggaagacgagcgaaagcaacgtgccctggcagctgcagcaaagaagaagctggaaggggacctgaaagacctggagcttcaggccgactctgccatcaaggggagggaggaagccatcaagcagctacgcaaactgcaggctcagatgaaggactttcaaagagagctggaagatgcccgtgcctccagagatgagatctttgccacagccaaagagaatgagaagaaagccaagagcttggaagcagacctcatgcagctacaagaggacctcgccgccgctgagagggctcgcaaacaagcggacctcgagaaggaggaactggcagaggagctggccagtagcctgtcgggaaggaacgcactccaggacgagaagcgccgcctggaggcccggatcgcccagctggaggaggagctggaggaggagcagggcaacatggaggccatgagcgaccgggtccgcaaagccacacagcaggccgagcagctcagcaacgagctggccacagagcgcagcacggcccagaagaatgagagtgcccggcagcagctcgagcggcagaacaaggagctccggagcaagctccacgagatggagggggccgtcaagtccaagttcaagtccaccatcgcggcgctggaggccaagattgcacagctggaggagcaggtcgagcaggaggccagagagaaacaggcggccaccaagtcgctgaagcagaaagacaagaagctgaaggaaatcttgctccaggtggaggacgagcgcaagatggccgagcagtacaaggagcaggcagagaaaggcaatgcctgaggactagtccctgttcccagagcccacttttttttctttttttgaaataaaatagcctgtctttcagatctcaaaggctcttttcagagccaccaaaaaaaaaaaaaaaaaaaaaaaaaaaaaaaaaaaaaaaaaaaaaaaaaaaaaaaaaaaaaaaaaaaaaaaaaaaaaaaaaaaaaaaaaaaaaaaaaaaaagaatt

SEQ ID NO: 1171 - RNA, 889 nt, synthetic construct
  misc_feature 1..889: note = Artificial____CBFbeta(1-165)_Linker_Lifeact mRNA wt mod
  source 1..889: mol_type = other RNA
aggagagtcccgcagtcggcgtccagcggctctgcttgttcgtgtgtgtgtcgttgcaggccttattcaagcttaccatgccgcgcgtcgtgcccgaccagagaagcaagtttgagaacgaggagttctttaggaagctgagccgcgagtgtgagattaagtacacgggctttagggaccggccccacgaggaacgccaggcacgcttccagaacgcctgccgcgacggccgctcggaaatcgcttttgtggccacaggaaccaatctgtctctccagttctttccggccagctggcagggagaacagcgacaaacacctagccgagagtatgtcgacttagaaagagaagcaggcaaggtatatttgaaggctcccatgattctgaatggagtctgtgttatctggaaaggctggattgatctccaaagactggatggtatgggctgtctggagtttgatgaggagcgagcccagcaggaggatgcattagcacaacaggcctttgaagaggctcggagaaggacacgcgaatttgaagatagagacaggtctcatcgggaggaaatggagggcgggagcggcgggtccggcgggagcggcggctccgggggcgggggcgtggccgacctgatcaagaagttcgagagcatctccaaggaggagggggacccgcccgtcgccacctgaggactagtccctgttcccagagcccacttttttttctttttttgaaataaaatagcctgtctttcagatctcaaaggctcttttcagagccaccaaaaaaaaaaaaaaaaaaaaaaaaaaaaaaaaaaaaaaaaaaaaaaaaaaaaaaaaaaaaaaaaaaaaaaaaaaaaaaaaaaaaaaaaaaaaaaaaaaaaagaatt

SEQ ID NO: 1172 - RNA, 856 nt, synthetic construct
  misc_feature 1..856: note = Artificial____CBFbeta(1-165)_HIF1alpha(549-575) mRNA wt mod
  source 1..856: mol_type = other RNA
aggagagtcccgcagtcggcgtccagcggctctgcttgttcgtgtgtgtgtcgttgcaggccttattcaagcttaccatgccgcgcgtcgtgcccgaccagagaagcaagtttgagaacgaggagttctttaggaagctgagccgcgagtgtgagattaagtacacgggctttagggaccggccccacgaggaacgccaggcacgcttccagaacgcctgccgcgacggccgctcggaaatcgcttttgtggccacaggaaccaatctgtctctccagttctttccggccagctggcagggagaacagcgacaaacacctagccgagagtatgtcgacttagaaagagaagcaggcaaggtatatttgaaggctcccatgattctgaatggagtctgtgttatctggaaaggctggattgatctccaaagactggatggtatgggctgtctggagtttgatgaggagcgagcccagcaggaggatgcattagcacaacaggcctttgaagaggctcggagaaggacacgcgaatttgaagatagagacaggtctcatcgggaggaaatggagccattttctactcaggacacagatttagacttggagatgttagctccctatatcccaatggatgatgacttccagttacgttgaggactagtccctgttcccagagcccacttttttttctttttttgaaataaaatagcctgtctttcagatctcaaaggctcttttcagagccaccaaaaaaaaaaaaaaaaaaaaaaaaaaaaaaaaaaaaaaaaaaaaaaaaaaaaaaaaaaaaaaaaaaaaaaaaaaaaaaaaaaaaaaaaaaaaaaaaaaaaagaatt

SEQ ID NO: 1173 - RNA, 901 nt, synthetic construct
  misc_feature 1..901: note Artificial____CBFbeta(1-165)_Linker_HIF1alpha(549-575) mRNA wt mod
  source 1..901: mol_type = other RNA
aggagagtcccgcagtcggcgtccagcggctctgcttgttcgtgtgtgtgtcgttgcaggccttattcaagcttaccatgccgcgcgtcgtgcccgaccagagaagcaagtttgagaacgaggagttctttaggaagctgagccgcgagtgtgagattaagtacacgggctttagggaccggccccacgaggaacgccaggcacgcttccagaacgcctgccgcgacggccgctcggaaatcgcttttgtggccacaggaaccaatctgtctctccagttctttccggccagctggcagggagaacagcgacaaacacctagccgagagtatgtcgacttagaaagagaagcaggcaaggtatatttgaaggctcccatgattctgaatggagtctgtgttatctggaaaggctggattgatctccaaagactggatggtatgggctgtctggagtttgatgaggagcgagcccagcaggaggatgcattagcacaacaggcctttgaagaggctcggagaaggacacgcgaatttgaagatagagacaggtctcatcgggaggaaatggagggcgggagcggcgggtccggcgggagcggcggctccgggggcgggccattttctactcaggacacagatttagacttggagatgttagctccctatatcccaatggatgatgacttccagttacgttgaggactagtccctgttcccagagcccacttttttttctttttttgaaataaaatagcctgtctttcagatctcaaaggctcttttcagagccaccaaaaaaaaaaaaaaaaaaaaaaaaaaaaaaaaaaaaaaaaaaaaaaaaaaaaaaaaaaaaaaaaaaaaaaaaaaaaaaaaaaaaaaaaaaaaaaaaaaaaagaatt

SEQ ID NO: 1174 - RNA, 2536 nt, synthetic construct
  misc_feature 1..2536: note = Artificial____RUNX1(1-177)_N_RUNX1T1a(31-604) mRNA wt mod
  source 1..2536: mol_type = other RNA
aggagagtcccgcagtcggcgtccagcggctctgcttgttcgtgtgtgtgtcgttgcaggccttattcaagcttaccatgcgtatccccgtagatgccagcacgagccgccgcttcacgccgccttccaccgcgctgagcccaggcaagatgagcgaggcgttgccgctgggcgccccggacgccggcgctgccctggccggcaagctgaggagcggcgaccgcagcatggtggaggtgctggccgaccacccgggcgagctggtgcgcaccgacagccccaacttcctctgctccgtgctgcctacgcactggcgctgcaacaagaccctgcccatcgctttcaaggtggtggccctaggggatgttccagatggcactctggtcactgtgatggctggcaatgatgaaaactactcggctgagctgagaaatgctaccgcagccatgaagaaccaggttgcaagatttaatgacctcaggtttgtcggtcgaagtggaagagggaaaagtttcactctgaccatcactgtcttcacaaacccaccgcaagtcgccacctaccacagagccatcaaaatcacagtggatgggccccgagaacctcgaaaccgtactgagaagcactccacaatgccagactcacctgtggatgtgaagacgcaatctaggctgactcctccaacaatgccacctcccccaactactcaaggagctccaagaaccagttcatttacaccgacaacgttaactaatggcacgagccattctcctacagccttgaatggcgccccctcaccacccaatggcttcagcaatgggccttcctcttcttcctcctcctctctggctaatcaacagctgcccccagcctgtggtgccaggcaactcagcaagctgaaaaggttccttactaccctgcagcagtttggcaatgacatttcacccgagataggagaaagagttcgcaccctcgttctgggacttgtgaactccactttgacaattgaagaatttcattccaaactgcaagaagctactaacttcccactgagaccttttgtcatcccatttttgaaggccaacttgcccctgctgcagcgtgagctcctccactgcgcaagactggccaaacagaaccctgcccagtacctcgcccagcatgaacagctgcttctggatgccagcaccacctcacctgttgactcctcagagctgcttctcgatgtgaacgaaaacgggaagaggcgaactccagacagaaccaaagaaaatggctttgacagagagcctttgcactcagaacatccaagcaagcgaccatgcactattagcccaggccagcggtacagtccaaataacggcttatcctaccagcccaatggcctgcctcaccctaccccacctccacctcagcattaccgtttggatgatatggccattgcccaccactacagggactcctatcgacaccccagccacagggacctcagggacagaaacagacctatggggttgcatggcacacgtcaagaagaaatgattgatcacagactaacagacagagaatgggcagaagagtggaaacatcttgaccatctgttaaactgcataatggacatggtagaaaaaacaaggcgatctctcaccgtactaaggcggtgtcaagaagcagaccgggaagaattgaattactggatccggcggtacagtgacgccgaggacttaaaaaaaggtggcggcagtagcagcagccactctaggcagcagagtcccgtcaacccagacccagttgcactagacgcgcatcgggagttccttcacaggcctgcgtctggatacgtgccagaggagatctggaagaaagctgaggaggccgtcaatgaggtgaagcgccaggcgatgacggagctgcagaaggccgtgtctgaggcggagcggaaagcccacgacatgatcacaacagagagggccaagatggagcgcacggtcgccgaggccaaacggcaggcggcggaggacgcactggcagttatcaatcagcaggaggattcaagcgagagttgctggaattgtggccgtaaagcgagtgaaacctgcagtggctgtaacacagcccgatactgtggctcattttgccagcacaaagactgggagaagcaccatcacatctgtggacagaccctgcaggcccagcagcagggagacacacctgcagtcagctcctctgtcacgcccaacagcggggctgggagcccgatggacacaccaccagcagccactccgaggtcaaccaccccgggaaccccttccaccatagagacaacccctcgctgaggactagtccctgttcccagagcccacttttttttctttttttgaaataaaatagcctgtctttcagatctcaaaggctcttttcagagccaccaaaaaaaaaaaaaaaaaaaaaaaaaaaaaaaaaaaaaaaaaaaaaaaaaaaaaaaaaaaaaaaaaaaaaaaaaaaaaaaaaaaaaaaaaaaaaaaaaaaaagaatt

SEQ ID NO: 1175 - RNA, 1051 nt, synthetic construct
  misc_feature 1..1051: note = Artificial____RUNX1(1-241)_RUNX1T1b(short) mRNA wt mod
  source 1..1051: mol_type = other RNA
aggagagtcccgcagtcggcgtccagcggctctgcttgttcgtgtgtgtgtcgttgcaggccttattcaagcttaccatgcgtatccccgtagatgccagcacgagccgccgcttcacgccgccttccaccgcgctgagcccaggcaagatgagcgaggcgttgccgctgggcgccccggacgccggcgctgccctggccggcaagctgaggagcggcgaccgcagcatggtggaggtgctggccgaccacccgggcgagctggtgcgcaccgacagccccaacttcctctgctccgtgctgcctacgcactggcgctgcaacaagaccctgcccatcgctttcaaggtggtggccctaggggatgttccagatggcactctggtcactgtgatggctggcaatgatgaaaactactcggctgagctgagaaatgctaccgcagccatgaagaaccaggttgcaagatttaatgacctcaggtttgtcggtcgaagtggaagagggaaaagtttcactctgaccatcactgtcttcacaaacccaccgcaagtcgccacctaccacagagccatcaaaatcacagtggatgggccccgagaacctcgaagacatcggcagaaactagatgatcagaccaagcccgggagcttgtccttttccgagcggctcagtgaactggagcagctgcggcgcacagccatgagggtcagcccacaccacccagcccccacgcccaaccctcgtgcctccctgaaccactccactgcctttaaccctcagcctcagagtcagatgcaggaggtgggcttctgccacgtcgcccaggtggggctgaagctcctgggctgaggactagtccctgttcccagagcccacttttttttctttttttgaaataaaatagcctgtctttcagatctcaaaggctcttttcagagccaccaaaaaaaaaaaaaaaaaaaaaaaaaaaaaaaaaaaaaaaaaaaaaaaaaaaaaaaaaaaaaaaaaaaaaaaaaaaaaaaaaaaaaaaaaaaaaaaaaaaaagaatt

SEQ ID NO: 1176 - RNA, 2755 nt, synthetic construct
  misc_feature 1..2755: note = Artificial____RUNX1(1-241)_V_RUNX1T1b(22-604) mRNA wt mod
  source 1..2755: mol_type = other RNA
aggagagtcccgcagtcggcgtccagcggctctgcttgttcgtgtgtgtgtcgttgcaggccttattcaagcttaccatgcgtatccccgtagatgccagcacgagccgccgcttcacgccgccttccaccgcgctgagcccaggcaagatgagcgaggcgttgccgctgggcgccccggacgccggcgctgccctggccggcaagctgaggagcggcgaccgcagcatggtggaggtgctggccgaccacccgggcgagctggtgcgcaccgacagccccaacttcctctgctccgtgctgcctacgcactggcgctgcaacaagaccctgcccatcgctttcaaggtggtggccctaggggatgttccagatggcactctggtcactgtgatggctggcaatgatgaaaactactcggctgagctgagaaatgctaccgcagccatgaagaaccaggttgcaagatttaatgacctcaggtttgtcggtcgaagtggaagagggaaaagtttcactctgaccatcactgtcttcacaaacccaccgcaagtcgccacctaccacagagccatcaaaatcacagtggatgggccccgagaacctcgaagacatcggcagaaactagatgatcagaccaagcccgggagcttgtccttttccgagcggctcagtgaactggagcagctgcggcgcacagccatgagggtcagcccacaccacccagcccccacgcccaaccctcgtgcctccctgaaccactccactgcctttaaccctcagcctcagagtcagatgcaggtgggtcctgagaaaagggtgccagcgatgcctggatcgcctgtggaagtgaagatacagtccagatcctcacctcccaccatgccacccctcccaccaataaatcctggaggaccgaggccagtgtccttcactcctactgcattaagcaatggcatcaaccattctcctcctaccctgaatggtgccccatcaccgccacagagattcagcaatggtcctgcctcctccacatcatctgcactcacaaatcagcaattgccagccacttgtggtgctcgacaactcagcaagttgaaacgctttcttaccactctgcaacagtttggcaatgacatctcccctgagattggggagaaggtgcggactcttgttcttgcactggtgaactcaacagtgacaattgaggagttccactgtaagctccaagaagccacaaactttccccttcgtccttttgtgattccatttctcaaggccaacctgcccctgctgcagcgggaactgctgcactgcgctcgggcggccaagcagaccccatcccagtacctggctcagcacgaacaccttctgctcaacacaagcattgcatcgcctgctgactcgtcagagttgctcatggaggtgcacggaaatgggaagaggcccagtccagagaggagagaagagaatagttttgatagagacacaattgctcctgagcctcctgccaagagagtatgtaccatcagccctgctcctcggcacagtcctgctctcactgtgcccctcatgaatcccgggggccaattccatcctacccctccacctcttcagcattacaccttagaggatattgcaacttctcacctgtatcgggaacccaacaagatgctagagcatcgagaagttcgtgatagacaccacagtcttggtctaaatggaggctatcaagatgagttggtagatcatcgtttgacagaaagggaatgggctgatgaatggaaacatcttgaccatgcgctgaattgcattatggaaatggtagagaaaacaaggcgctctatggcagttctgcggcgctgtcaggaatcagatcgtgaagaactcaactactggaaaagacggtacaatgaaaacacagagctgaggaaaacggggaccgagttggtctccaggcagcacagccctgggagtgcagattctctcagcaatgattctcagagagagttcaacagcaggccaggtacaggatacgtacctgtggagttttggaagaaaacagaagaagctgtgaataaggtgaaaattcaggccatgtcagaagtacagaaggccgtcgctgaggcagagcagaaagcctttgaagtgattgcaacagagagagcacgaatggagcaaaccatagcggatgtcaagcggcaggccgcagaggatgctttcctcgtcatcaatgagcaagaggagtccacggagaactgctggaactgtggccgcaaagccagcgagacatgcagtggctgcaatatcgcgcgatactgtggctctttctgccagcacaaggactgggagcggcaccaccgcctctgtggtcagaacctgcatggccagagcccccacggccagggccggccgctgcttcctgtaggcaggggctcctctgccaggtccgccgactgcagcgtgcccagcccagccctcgacaagacctcggcaaccacatcgcgttcctcaacacctgcttctgtgacagctatcgacaccaacggactctgaggactagtccctgttcccagagcccacttttttttctttttttgaaataaaatagcctgtctttcagatctcaaaggctcttttcagagccaccaaaaaaaaaaaaaaaaaaaaaaaaaaaaaaaaaaaaaaaaaaaaaaaaaaaaaaaaaaaaaaaaaaaaaaaaaaaaaaaaaaaaaaaaaaaaaaaaaaaaagaatt

SEQ ID NO: 1177 - RNA, 2755 nt, synthetic construct
  misc_feature 1..2755: note = Artificial____RUNX1(1-241)_I_RUNX1T1b(22-604) mRNA wt mod
  source 1..2755: mol_type = other RNA
aggagagtcccgcagtcggcgtccagcggctctgcttgttcgtgtgtgtgtcgttgcaggccttattcaagcttaccatgcgtatccccgtagatgccagcacgagccgccgcttcacgccgccttccaccgcgctgagcccaggcaagatgagcgaggcgttgccgctgggcgccccggacgccggcgctgccctggccggcaagctgaggagcggcgaccgcagcatggtggaggtgctggccgaccacccgggcgagctggtgcgcaccgacagccccaacttcctctgctccgtgctgcctacgcactggcgctgcaacaagaccctgcccatcgctttcaaggtggtggccctaggggatgttccagatggcactctggtcactgtgatggctggcaatgatgaaaactactcggctgagctgagaaatgctaccgcagccatgaagaaccaggttgcaagatttaatgacctcaggtttgtcggtcgaagtggaagagggaaaagtttcactctgaccatcactgtcttcacaaacccaccgcaagtcgccacctaccacagagccatcaaaatcacagtggatgggccccgagaacctcgaagacatcggcagaaactagatgatcagaccaagcccgggagcttgtccttttccgagcggctcagtgaactggagcagctgcggcgcacagccatgagggtcagcccacaccacccagcccccacgcccaaccctcgtgcctccctgaaccactccactgcctttaaccctcagcctcagagtcagatgcagatcggtcctgagaaaagggtgccagcgatgcctggatcgcctgtggaagtgaagatacagtccagatcctcacctcccaccatgccacccctcccaccaataaatcctggaggaccgaggccagtgtccttcactcctactgcattaagcaatggcatcaaccattctcctcctaccctgaatggtgccccatcaccgccacagagattcagcaatggtcctgcctcctccacatcatctgcactcacaaatcagcaattgccagccacttgtggtgctcgacaactcagcaagttgaaacgctttcttaccactctgcaacagtttggcaatgacatctcccctgagattggggagaaggtgcggactcttgttcttgcactggtgaactcaacagtgacaattgaggagttccactgtaagctccaagaagccacaaactttccccttcgtccttttgtgattccatttctcaaggccaacctgcccctgctgcagcgggaactgctgcactgcgctcgggcggccaagcagaccccatcccagtacctggctcagcacgaacaccttctgctcaacacaagcattgcatcgcctgctgactcgtcagagttgctcatggaggtgcacggaaatgggaagaggcccagtccagagaggagagaagagaatagttttgatagagacacaattgctcctgagcctcctgccaagagagtatgtaccatcagccctgctcctcggcacagtcctgctctcactgtgcccctcatgaatcccgggggccaattccatcctacccctccacctcttcagcattacaccttagaggatattgcaacttctcacctgtatcgggaacccaacaagatgctagagcatcgagaagttcgtgatagacaccacagtcttggtctaaatggaggctatcaagatgagttggtagatcatcgtttgacagaaagggaatgggctgatgaatggaaacatcttgaccatgcgctgaattgcattatggaaatggtagagaaaacaaggcgctctatggcagttctgcggcgctgtcaggaatcagatcgtgaagaactcaactactggaaaagacggtacaatgaaaacacagagctgaggaaaacggggaccgagttggtctccaggcagcacagccctgggagtgcagattctctcagcaatgattctcagagagagttcaacagcaggccaggtacaggatacgtacctgtggagttttggaagaaaacagaagaagctgtgaataaggtgaaaattcaggccatgtcagaagtacagaaggccgtcgctgaggcagagcagaaagcctttgaagtgattgcaacagagagagcacgaatggagcaaaccatagcggatgtcaagcggcaggccgcagaggatgctttcctcgtcatcaatgagcaagaggagtccacggagaactgctggaactgtggccgcaaagccagcgagacatgcagtggctgcaatatcgcgcgatactgtggctctttctgccagcacaaggactgggagcggcaccaccgcctctgtggtcagaacctgcatggccagagcccccacggccagggccggccgctgcttcctgtaggcaggggctcctctgccaggtccgccgactgcagcgtgcccagcccagccctcgacaagacctcggcaaccacatcgcgttcctcaacacctgcttctgtgacagctatcgacaccaacggactctgaggactagtccctgttcccagagcccacttttttttctttttttgaaataaaatagcctgtctttcagatctcaaaggctcttttcagagccaccaaaaaaaaaaaaaaaaaaaaaaaaaaaaaaaaaaaaaaaaaaaaaaaaaaaaaaaaaaaaaaaaaaaaaaaaaaaaaaaaaaaaaaaaaaaaaaaaaaaaagaatt

SEQ ID NO: 1178 - RNA, 1639 nt, synthetic construct
  misc_feature 1..1639: note = Homo sapiens__Q01196-1__RUNX1(K83E_R174Q) mRNA opt1
  source 1..1639: mol_type = other RNA
aggagagtcccgcagtcggcgtccagcggctctgcttgttcgtgtgtgtgtcgttgcaggccttattcaagcttaccatgcgcatccccgtggacgccagcacctcccggcgcttcaccccgcccagcacggccctgtcccccggcaagatgagcgaggcgctccccctgggggccccggacgccggcgccgccctggcggggaagctccggtccggcgaccgcagcatggtcgaggtgctggccgaccaccccggggagctggtgcggaccgactcccccaacttcctctgcagcgtcctgcccacccactggcgctgcaacgagaccctgccgatcgccttcaaggtggtggccctcggcgacgtccccgacggcacgctggtgaccgtgatggcggggaacgacgagaactactccgccgagctgcggaacgccaccgccgccatgaagaaccaggtcgcgcgcttcaacgacctccggttcgtgggccgcagcgggcggggcaagtccttcaccctgacgatcaccgtgttcaccaacccgccccaggtcgccacctaccaccgcgccatcaagatcacggtggacgggccccaggagccccgccggcaccgccagaagctggacgaccagaccaagcccggcagcctctccttcagcgagcggctgtccgagctggagcagctccgccggaccgccatgcgcgtgagcccccaccacccggcccccacccccaacccccgggcgtccctgaaccacagcacggccttcaacccgcagccccagtcccagatgcaggacacccgccagatccagcccagcccgccctggagctacgaccagtcctaccagtacctgggcagcatcgcctcccccagcgtccaccccgccacccccatctccccggggcgcgccagcggcatgaccacgctctccgcggagctgagctcccggctgagcaccgcccccgacctcaccgccttctccgacccccgccagttcccggccctgcccagcatctccgacccccggatgcactaccccggggccttcacctacagcccgacgcccgtgacctccggcatcggcatcgggatgagcgcgatgggctccgccacccgctaccacacctacctgcccccgccctaccccgggagctcccaggcccagggcgggcccttccaggccagcagcccctcctaccacctctactacggcgcgagcgccggctcctaccagttcagcatggtcgggggcgagcggtccccgccccgcatcctgccgccctgcacgaacgccagcaccgggtccgccctgctcaaccccagcctgcccaaccagtccgacgtggtggaggccgagggcagccactccaacagccccaccaacatggcgccctccgcccggctggaggaggccgtgtggcgcccgtactgaggactagtccctgttcccagagcccacttttttttctttttttgaaataaaatagcctgtctttcagatctcaaaggctcttttcagagccaccaaaaaaaaaaaaaaaaaaaaaaaaaaaaaaaaaaaaaaaaaaaaaaaaaaaaaaaaaaaaaaaaaaaaaaaaaaaaaaaaaaaaaaaaaaaaaaaaaaaaagaatt

SEQ ID NO: 1179 - RNA, 2113 nt, synthetic construct
  misc_feature 1..2113: note = Homo sapiens____CBFbeta(1-165)_SMMHC(1527-1972) mRNA opt1
  source 1..2113: mol_type = other RNA
aggagagtcccgcagtcggcgtccagcggctctgcttgttcgtgtgtgtgtcgttgcaggccttattcaagcttaccatgccccgcgtggtcccggaccagcggagcaagttcgagaacgaggagttcttccgcaagctgtcccgggagtgcgagatcaagtacaccggcttccgcgaccggccccacgaggagcgccaggcccggttccagaacgcctgccgcgacgggcggagcgagatcgcgttcgtggccaccggcacgaacctctccctgcagttcttccccgccagctggcagggggagcagcgccagaccccctcccgggagtacgtggacctggagcgcgaggccggcaaggtctacctcaaggccccgatgatcctgaacggggtgtgcgtgatctggaagggctggatcgacctgcagcggctcgacggcatggggtgcctggagttcgacgaggagcgcgcgcagcaggaggacgccctggcccagcaggccttcgaggaggcgcggcgccggacccgcgagttcgaggaccgggaccgcagccaccgggaggagatggaggtgcacgagctggagaagtccaagcgcgccctcgagacccagatggaggagatgaagacccagctggaggagctggaggacgagctccaggccacggaggacgcgaagctgcggctggaggtcaacatgcaggccctcaagggccagttcgagcgcgacctgcaggcccgggacgagcagaacgaggagaagcgccggcagctgcagcgccagctccacgagtacgagaccgagctggaggacgagcggaagcagcgcgccctggccgcggccgccaagaagaagctcgagggggacctgaaggacctggagctccaggccgacagcgcgatcaagggccgggaggaggccatcaagcagctgcgcaagctgcaggcccagatgaaggacttccagcgggagctcgaggacgcccgcgccagccgggacgagatcttcgcgaccgccaaggagaacgagaagaaggccaagtccctggaggccgacctgatgcagctccaggaggacctggccgcggccgagcgcgcccggaagcaggccgacctggagaaggaggagctcgccgaggagctggcgagctccctgagcgggcgcaacgccctccaggacgagaagcggcgcctggaggcccggatcgcccagctggaggaggagctcgaggaggagcagggcaacatggaggccatgtccgaccgcgtgcggaaggcgacccagcaggccgagcagctgagcaacgagctggccacggagcgctccaccgcccagaagaacgagagcgcgcgccagcagctcgagcggcagaacaaggagctgcgctccaagctgcacgagatggagggggccgtgaagtccaagttcaagagcaccatcgccgccctcgaggccaagatcgcgcagctggaggagcaggtcgagcaggaggcccgggagaagcaggccgccaccaagagcctgaagcagaaggacaagaagctcaaggagatcctgctccaggtggaggacgagcgcaagatggccgagcagtacaaggagcaggcggagaagggcaacgcccgggtgaagcagctgaagcgccagctggaggaggccgaggaggagtcccagcggatcaacgccaaccgccggaagctgcagcgcgagctcgacgaggccacggagagcaacgaggcgatgggccgggaggtcaacgccctgaagtccaagctgcgccgggggaacgagaccagcttcgtgccctcccgccggagcggcgggcgccgggtgatcgagaacgccgacggcagcgaggaggagaccgacacccgcgacgccgacttcaacgggacgaaggcgtccgagtgaggactagtccctgttcccagagcccacttttttttctttttttgaaataaaatagcctgtctttcagatctcaaaggctcttttcagagccaccaaaaaaaaaaaaaaaaaaaaaaaaaaaaaaaaaaaaaaaaaaaaaaaaaaaaaaaaaaaaaaaaaaaaaaaaaaaaaaaaaaaaaaaaaaaaaaaaaaaaagaatt

SEQ ID NO: 1180 - RNA, 1828 nt, synthetic construct
  misc_feature 1..1828: note = Artificial____CBFbeta(1-165)_SMMHC(1527-1877) mRNA opt1
  source 1..1828: mol_type = other RNA
aggagagtcccgcagtcggcgtccagcggctctgcttgttcgtgtgtgtgtcgttgcaggccttattcaagcttaccatgccccgcgtggtcccggaccagcggagcaagttcgagaacgaggagttcttccgcaagctgtcccgggagtgcgagatcaagtacaccggcttccgcgaccggccccacgaggagcgccaggcccggttccagaacgcctgccgcgacgggcggagcgagatcgcgttcgtggccaccggcacgaacctctccctgcagttcttccccgccagctggcagggggagcagcgccagaccccctcccgggagtacgtggacctggagcgcgaggccggcaaggtctacctcaaggccccgatgatcctgaacggggtgtgcgtgatctggaagggctggatcgacctgcagcggctcgacggcatggggtgcctggagttcgacgaggagcgcgcgcagcaggaggacgccctggcccagcaggccttcgaggaggcgcggcgccggacccgcgagttcgaggaccgggaccgcagccaccgggaggagatggaggtgcacgagctggagaagtccaagcgcgccctcgagacccagatggaggagatgaagacccagctggaggagctggaggacgagctccaggccacggaggacgcgaagctgcggctggaggtcaacatgcaggccctcaagggccagttcgagcgcgacctgcaggcccgggacgagcagaacgaggagaagcgccggcagctgcagcgccagctccacgagtacgagaccgagctggaggacgagcggaagcagcgcgccctggccgcggccgccaagaagaagctcgagggggacctgaaggacctggagctccaggccgacagcgcgatcaagggccgggaggaggccatcaagcagctgcgcaagctgcaggcccagatgaaggacttccagcgggagctcgaggacgcccgcgccagccgggacgagatcttcgcgaccgccaaggagaacgagaagaaggccaagtccctggaggccgacctgatgcagctccaggaggacctggccgcggccgagcgcgcccggaagcaggccgacctggagaaggaggagctcgccgaggagctggcgagctccctgagcgggcgcaacgccctccaggacgagaagcggcgcctggaggcccggatcgcccagctggaggaggagctcgaggaggagcagggcaacatggaggccatgtccgaccgcgtgcggaaggcgacccagcaggccgagcagctgagcaacgagctggccacggagcgctccaccgcccagaagaacgagagcgcgcgccagcagctcgagcggcagaacaaggagctgcgctccaagctgcacgagatggagggggccgtgaagtccaagttcaagagcaccatcgccgccctcgaggccaagatcgcgcagctggaggagcaggtcgagcaggaggcccgggagaagcaggccgccaccaagagcctgaagcagaaggacaagaagctcaaggagatcctgctccaggtggaggacgagcgcaagatggccgagcagtacaaggagcaggcggagaagggcaacgcctgaggactagtccctgttcccagagcccacttttttttctttttttgaaataaaatagcctgtctttcagatctcaaaggctcttttcagagccaccaaaaaaaaaaaaaaaaaaaaaaaaaaaaaaaaaaaaaaaaaaaaaaaaaaaaaaaaaaaaaaaaaaaaaaaaaaaaaaaaaaaaaaaaaaaaaaaaaaaaagaatt

SEQ ID NO: 1181 - RNA, 889 nt, synthetic construct
  misc_feature 1..889: note = Artificial____CBFbeta(1-165)_Linker_Lifeact mRNA opt1
  source 1..889: mol_type = other RNA
aggagagtcccgcagtcggcgtccagcggctctgcttgttcgtgtgtgtgtcgttgcaggccttattcaagcttaccatgccccgcgtggtcccggaccagcggagcaagttcgagaacgaggagttcttccgcaagctgtcccgggagtgcgagatcaagtacaccggcttccgcgaccggccccacgaggagcgccaggcccggttccagaacgcctgccgcgacgggcggagcgagatcgcgttcgtggccaccggcacgaacctctccctgcagttcttccccgccagctggcagggggagcagcgccagaccccctcccgggagtacgtggacctggagcgcgaggccggcaaggtctacctcaaggccccgatgatcctgaacggggtgtgcgtgatctggaagggctggatcgacctgcagcggctcgacggcatggggtgcctggagttcgacgaggagcgcgcgcagcaggaggacgccctggcccagcaggccttcgaggaggcgcggcgccggacccgcgagttcgaggaccgggaccgcagccaccgggaggagatggagggcgggagcggcgggtccggcgggagcggcggctccgggggcgggggcgtggccgacctgatcaagaagttcgagagcatctccaaggaggagggggacccgcccgtcgccacctgaggactagtccctgttcccagagcccacttttttttctttttttgaaataaaatagcctgtctttcagatctcaaaggctcttttcagagccaccaaaaaaaaaaaaaaaaaaaaaaaaaaaaaaaaaaaaaaaaaaaaaaaaaaaaaaaaaaaaaaaaaaaaaaaaaaaaaaaaaaaaaaaaaaaaaaaaaaaaagaatt

SEQ ID NO: 1182 - RNA, 856 nt, synthetic construct
  misc_feature 1..856: note = Artificial____CBFbeta(1-165)_HIF1alpha(549-575) mRNA opt1
  source 1..856: mol_type = other RNA
aggagagtcccgcagtcggcgtccagcggctctgcttgttcgtgtgtgtgtcgttgcaggccttattcaagcttaccatgccccgcgtggtcccggaccagcggagcaagttcgagaacgaggagttcttccgcaagctgtcccgggagtgcgagatcaagtacaccggcttccgcgaccggccccacgaggagcgccaggcccggttccagaacgcctgccgcgacgggcggagcgagatcgcgttcgtggccaccggcacgaacctctccctgcagttcttccccgccagctggcagggggagcagcgccagaccccctcccgggagtacgtggacctggagcgcgaggccggcaaggtctacctcaaggccccgatgatcctgaacggggtgtgcgtgatctggaagggctggatcgacctgcagcggctcgacggcatggggtgcctggagttcgacgaggagcgcgcgcagcaggaggacgccctggcccagcaggccttcgaggaggcgcggcgccggacccgcgagttcgaggaccgggaccgcagccaccgggaggagatggagcccttcagcacccaggacaccgacctggacctcgagatgctggccccgtacatccccatggacgacgacttccagctgcgctgaggactagtccctgttcccagagcccacttttttttctttttttgaaataaaatagcctgtctttcagatctcaaaggctcttttcagagccaccaaaaaaaaaaaaaaaaaaaaaaaaaaaaaaaaaaaaaaaaaaaaaaaaaaaaaaaaaaaaaaaaaaaaaaaaaaaaaaaaaaaaaaaaaaaaaaaaaaaaagaatt

SEQ ID NO: 1183 - RNA, 901 nt, synthetic construct
  misc_feature 1..901: note Artificial____CBFbeta(1-165)_Linker_HIF1alpha(549-575) mRNA opt1
  source 1..901: mol_type = other RNA
aggagagtcccgcagtcggcgtccagcggctctgcttgttcgtgtgtgtgtcgttgcaggccttattcaagcttaccatgccccgcgtggtcccggaccagcggagcaagttcgagaacgaggagttcttccgcaagctgtcccgggagtgcgagatcaagtacaccggcttccgcgaccggccccacgaggagcgccaggcccggttccagaacgcctgccgcgacgggcggagcgagatcgcgttcgtggccaccggcacgaacctctccctgcagttcttccccgccagctggcagggggagcagcgccagaccccctcccgggagtacgtggacctggagcgcgaggccggcaaggtctacctcaaggccccgatgatcctgaacggggtgtgcgtgatctggaagggctggatcgacctgcagcggctcgacggcatggggtgcctggagttcgacgaggagcgcgcgcagcaggaggacgccctggcccagcaggccttcgaggaggcgcggcgccggacccgcgagttcgaggaccgggaccgcagccaccgggaggagatggagggcgggagcggcgggtccggcgggagcggcggctccgggggcgggcccttcagcacccaggacaccgacctggacctcgagatgctggccccgtacatccccatggacgacgacttccagctgcgctgaggactagtccctgttcccagagcccacttttttttctttttttgaaataaaatagcctgtctttcagatctcaaaggctcttttcagagccaccaaaaaaaaaaaaaaaaaaaaaaaaaaaaaaaaaaaaaaaaaaaaaaaaaaaaaaaaaaaaaaaaaaaaaaaaaaaaaaaaaaaaaaaaaaaaaaaaaaaaagaatt

SEQ ID NO: 1184 - RNA, 2536 nt, synthetic construct
  misc_feature 1..2536: note = Artificial____RUNX1(1-177)_N_RUNX1T1a(31-604) mRNA opt1
  source 1..2536: mol_type = other RNA
aggagagtcccgcagtcggcgtccagcggctctgcttgttcgtgtgtgtgtcgttgcaggccttattcaagcttaccatgcgcatccccgtggacgccagcacctcccggcgcttcaccccgcccagcacggccctgtcccccggcaagatgagcgaggcgctccccctgggggccccggacgccggcgccgccctggcggggaagctccggtccggcgaccgcagcatggtcgaggtgctggccgaccaccccggggagctggtgcggaccgactcccccaacttcctctgcagcgtcctgcccacccactggcgctgcaacaagaccctgccgatcgccttcaaggtggtggccctcggcgacgtccccgacggcacgctggtgaccgtgatggcggggaacgacgagaactactccgccgagctgcggaacgccaccgccgccatgaagaaccaggtcgcgcgcttcaacgacctccggttcgtgggccgcagcgggcggggcaagtccttcaccctgacgatcaccgtgttcaccaacccgccccaggtcgccacctaccaccgcgccatcaagatcacggtggacgggccccgggagccccgcaaccggaccgagaagcacagcacgatgcccgactccccggtggacgtgaagacccagagccgcctgaccccgcccaccatgcccccgccgcccacgacccagggcgcgccccggacctccagcttcacccccacgaccctgaccaacgggacctcccacagccccacggccctcaacggcgccccctccccgcccaacgggttcagcaacggcccctccagctccagctccagctccctggccaaccagcagctgccgcccgcctgcggcgcccgccagctcagcaagctgaagcggttcctgaccaccctccagcagttcgggaacgacatctcccccgagatcggcgagcgcgtccggaccctggtgctggggctcgtgaacagcacgctgaccatcgaggagttccacagcaagctgcaggaggcgaccaacttccccctccgccccttcgtcatccccttcctgaaggccaacctgcccctcctgcagcgggagctgctccactgcgcccgcctggccaagcagaaccccgcgcagtacctggcccagcacgagcagctcctgctggacgcctccaccacgagccccgtggactccagcgagctcctgctggacgtgaacgagaacggcaagcggcgcacccccgaccggaccaaggagaacgggttcgaccgcgagccgctccactccgagcaccccagcaagcggccctgcaccatctcccccggccagcgctacagcccgaacaacggcctgtcctaccagcccaacgggctgccccacccgacgcccccgccgccccagcactaccggctcgacgacatggccatcgcccaccactaccgcgacagctaccggcacccctcccaccgcgacctgcgcgaccggaaccgccccatgggcctgcacgggacccggcaggaggagatgatcgaccaccgcctcaccgaccgggagtgggcggaggagtggaagcacctggaccacctcctgaactgcatcatggacatggtcgagaagacccgccggagcctgacggtgctgcgccggtgccaggaggccgaccgcgaggagctcaactactggatccggcgctactccgacgccgaggacctgaagaagggcggcgggagctccagctcccacagccggcagcagtcccccgtgaaccccgaccccgtcgccctggacgcccaccgcgagttcctccaccggcccgcgagcggctacgtgcccgaggagatctggaagaaggccgaggaggccgtgaacgaggtcaagcgccaggccatgaccgagctgcagaaggccgtgagcgaggcggagcggaaggcccacgacatgatcaccaccgagcgcgccaagatggagcggacggtggccgaggccaagcgccaggcggccgaggacgccctggccgtcatcaaccagcaggaggactccagcgagtcctgctggaactgcgggcgcaaggcgagcgagacctgctccggctgcaacaccgcccggtactgcgggagcttctgccagcacaaggactgggagaagcaccaccacatctgcggccagaccctgcaggcccagcagcagggcgacacgccggccgtgtccagctccgtgacccccaacagcggggccggctcccccatggacacgcccccggcggccacgccccgcagcaccacccccgggaccccctccaccatcgagaccaccccgcggtgaggactagtccctgttcccagagcccacttttttttctttttttgaaataaaatagcctgtctttcagatctcaaaggctcttttcagagccaccaaaaaaaaaaaaaaaaaaaaaaaaaaaaaaaaaaaaaaaaaaaaaaaaaaaaaaaaaaaaaaaaaaaaaaaaaaaaaaaaaaaaaaaaaaaaaaaaaaaaagaatt

SEQ ID NO: 1185 - RNA, 1051 nt, synthetic construct
  misc_feature 1..1051: note = Artificial____RUNX1(1-241)_RUNX1T1b(short) mRNA opt1
  source 1..1051: mol_type = other RNA
aggagagtcccgcagtcggcgtccagcggctctgcttgttcgtgtgtgtgtcgttgcaggccttattcaagcttaccatgcgcatccccgtggacgccagcacctcccggcgcttcaccccgcccagcacggccctgtcccccggcaagatgagcgaggcgctccccctgggggccccggacgccggcgccgccctggcggggaagctccggtccggcgaccgcagcatggtcgaggtgctggccgaccaccccggggagctggtgcggaccgactcccccaacttcctctgcagcgtcctgcccacccactggcgctgcaacaagaccctgccgatcgccttcaaggtggtggccctcggcgacgtccccgacggcacgctggtgaccgtgatggcggggaacgacgagaactactccgccgagctgcggaacgccaccgccgccatgaagaaccaggtcgcgcgcttcaacgacctccggttcgtgggccgcagcgggcggggcaagtccttcaccctgacgatcaccgtgttcaccaacccgccccaggtcgccacctaccaccgcgccatcaagatcacggtggacgggccccgggagccccgccggcaccgccagaagctggacgaccagaccaagcccggcagcctctccttcagcgagcggctgtccgagctggagcagctccgccggaccgccatgcgcgtgagcccccaccacccggcccccacccccaacccccgggcgtccctgaaccacagcacggccttcaacccgcagccccagtcccagatgcaggaggtgggcttctgccacgtcgcccaggtggggctgaagctcctgggctgaggactagtccctgttcccagagcccacttttttttctttttttgaaataaaatagcctgtctttcagatctcaaaggctcttttcagagccaccaaaaaaaaaaaaaaaaaaaaaaaaaaaaaaaaaaaaaaaaaaaaaaaaaaaaaaaaaaaaaaaaaaaaaaaaaaaaaaaaaaaaaaaaaaaaaaaaaaaaagaatt

SEQ ID NO: 1186 - RNA, 2755 nt, synthetic construct
  misc_feature 1..2755: note = Artificial____RUNX1(1-241)_V_RUNX1T1b(22-604) mRNA opt1
  source 1..2755: mol_type = other RNA
aggagagtcccgcagtcggcgtccagcggctctgcttgttcgtgtgtgtgtcgttgcaggccttattcaagcttaccatgcgcatccccgtggacgccagcacctcccggcgcttcaccccgcccagcacggccctgtcccccggcaagatgagcgaggcgctccccctgggggccccggacgccggcgccgccctggcggggaagctccggtccggcgaccgcagcatggtcgaggtgctggccgaccaccccggggagctggtgcggaccgactcccccaacttcctctgcagcgtcctgcccacccactggcgctgcaacaagaccctgccgatcgccttcaaggtggtggccctcggcgacgtccccgacggcacgctggtgaccgtgatggcggggaacgacgagaactactccgccgagctgcggaacgccaccgccgccatgaagaaccaggtcgcgcgcttcaacgacctccggttcgtgggccgcagcgggcggggcaagtccttcaccctgacgatcaccgtgttcaccaacccgccccaggtcgccacctaccaccgcgccatcaagatcacggtggacgggccccgggagccccgccggcaccgccagaagctggacgaccagaccaagcccggcagcctctccttcagcgagcggctgtccgagctggagcagctccgccggaccgccatgcgcgtgagcccccaccacccggcccccacccccaacccccgggcgtccctgaaccacagcacggccttcaacccgcagccccagtcccagatgcaggtggggcccgagaagcgggtgccggcgatgcccggcagccccgtggaggtcaagatccagtcccgcagctccccgcccaccatgccgcccctgccgcccatcaaccccgggggcccccggcccgtgagcttcacccccacggccctgtccaacgggatcaaccactccccgcccaccctcaacggcgcccccagcccgccccagcgcttcagcaacggccccgcctccagcacctccagcgccctgaccaaccagcagctgcccgcgacgtgcggggcccggcagctctccaagctgaagcgcttcctgaccaccctccagcagttcggcaacgacatcagccccgagatcggggagaaggtgcggaccctggtcctggccctcgtgaactccacggtgaccatcgaggagttccactgcaagctgcaggaggccaccaacttccccctgcgccccttcgtcatccccttcctcaaggcgaacctgccgctgctccagcgggagctgctgcactgcgcccgcgccgccaagcagacccccagccagtacctcgcccagcacgagcacctcctgctgaacacgtccatcgcgagccccgccgacagctccgagctgctgatggaggtgcacggcaacgggaagcggcccagcccggagcgccgggaggagaactccttcgaccgcgacaccatcgcccccgagcccccggccaagcgggtgtgcaccatcagccccgcgccccgccactcccccgccctcaccgtcccgctgatgaaccccggcggccagttccaccccacgcccccgcccctgcagcactacaccctcgaggacatcgccaccagccacctgtaccgggagcccaacaagatgctggagcaccgcgaggtgcgggaccgccaccactccctcgggctgaacggcgggtaccaggacgagctggtggaccaccggctcaccgagcgcgagtgggccgacgagtggaagcacctggaccacgccctgaactgcatcatggagatggtcgagaagacgcgccggagcatggccgtgctccgccggtgccaggagtccgaccgcgaggagctgaactactggaagcggcgctacaacgagaacaccgagctgcggaagaccggcaccgagctcgtgagccgccagcactcccccggcagcgcggactccctgagcaacgactcccagcgggagttcaacagccgcccggggacgggctacgtccccgtggagttctggaagaagaccgaggaggccgtgaacaaggtcaagatccaggccatgtccgaggtgcagaaggccgtggccgaggcggagcagaaggccttcgaggtcatcgccaccgagcgggcccgcatggagcagaccatcgcggacgtgaagcggcaggccgccgaggacgccttcctggtcatcaacgagcaggaggagagcacggagaactgctggaactgcgggcgcaaggcctccgagacctgcagcggctgcaacatcgcgcggtactgcgggagcttctgccagcacaaggactgggagcgccaccaccggctctgcggccagaacctgcacggccagtccccgcacgggcagggccgccccctgctgcccgtggggcggggcagctccgcccgcagcgccgactgctccgtgcccagccccgccctcgacaagacctccgccaccacgagccgctccagcacccccgcgtccgtcaccgccatcgacaccaacgggctgtgaggactagtccctgttcccagagcccacttttttttctttttttgaaataaaatagcctgtctttcagatctcaaaggctcttttcagagccaccaaaaaaaaaaaaaaaaaaaaaaaaaaaaaaaaaaaaaaaaaaaaaaaaaaaaaaaaaaaaaaaaaaaaaaaaaaaaaaaaaaaaaaaaaaaaaaaaaaaaagaatt

SEQ ID NO: 1187 - RNA, 2755 nt, synthetic construct
  misc_feature 1..2755: note = Artificial____RUNX1(1-241)_I_RUNX1T1b(22-604) mRNA opt1
  source 1..2755: mol_type = other RNA
aggagagtcccgcagtcggcgtccagcggctctgcttgttcgtgtgtgtgtcgttgcaggccttattcaagcttaccatgcgcatccccgtggacgccagcacctcccggcgcttcaccccgcccagcacggccctgtcccccggcaagatgagcgaggcgctccccctgggggccccggacgccggcgccgccctggcggggaagctccggtccggcgaccgcagcatggtcgaggtgctggccgaccaccccggggagctggtgcggaccgactcccccaacttcctctgcagcgtcctgcccacccactggcgctgcaacaagaccctgccgatcgccttcaaggtggtggccctcggcgacgtccccgacggcacgctggtgaccgtgatggcggggaacgacgagaactactccgccgagctgcggaacgccaccgccgccatgaagaaccaggtcgcgcgcttcaacgacctccggttcgtgggccgcagcgggcggggcaagtccttcaccctgacgatcaccgtgttcaccaacccgccccaggtcgccacctaccaccgcgccatcaagatcacggtggacgggccccgggagccccgccggcaccgccagaagctggacgaccagaccaagcccggcagcctctccttcagcgagcggctgtccgagctggagcagctccgccggaccgccatgcgcgtgagcccccaccacccggcccccacccccaacccccgggcgtccctgaaccacagcacggccttcaacccgcagccccagtcccagatgcagatcgggcccgagaagcgggtgccggcgatgcccggcagccccgtggaggtcaagatccagtcccgcagctccccgcccaccatgccgcccctgccgcccatcaaccccgggggcccccggcccgtgagcttcacccccacggccctgtccaacgggatcaaccactccccgcccaccctcaacggcgcccccagcccgccccagcgcttcagcaacggccccgcctccagcacctccagcgccctgaccaaccagcagctgcccgcgacgtgcggggcccggcagctctccaagctgaagcgcttcctgaccaccctccagcagttcggcaacgacatcagccccgagatcggggagaaggtgcggaccctggtcctggccctcgtgaactccacggtgaccatcgaggagttccactgcaagctgcaggaggccaccaacttccccctgcgccccttcgtcatccccttcctcaaggcgaacctgccgctgctccagcgggagctgctgcactgcgcccgcgccgccaagcagacccccagccagtacctcgcccagcacgagcacctcctgctgaacacgtccatcgcgagccccgccgacagctccgagctgctgatggaggtgcacggcaacgggaagcggcccagcccggagcgccgggaggagaactccttcgaccgcgacaccatcgcccccgagcccccggccaagcgggtgtgcaccatcagccccgcgccccgccactcccccgccctcaccgtcccgctgatgaaccccggcggccagttccaccccacgcccccgcccctgcagcactacaccctcgaggacatcgccaccagccacctgtaccgggagcccaacaagatgctggagcaccgcgaggtgcgggaccgccaccactccctcgggctgaacggcgggtaccaggacgagctggtggaccaccggctcaccgagcgcgagtgggccgacgagtggaagcacctggaccacgccctgaactgcatcatggagatggtcgagaagacgcgccggagcatggccgtgctccgccggtgccaggagtccgaccgcgaggagctgaactactggaagcggcgctacaacgagaacaccgagctgcggaagaccggcaccgagctcgtgagccgccagcactcccccggcagcgcggactccctgagcaacgactcccagcgggagttcaacagccgcccggggacgggctacgtccccgtggagttctggaagaagaccgaggaggccgtgaacaaggtcaagatccaggccatgtccgaggtgcagaaggccgtggccgaggcggagcagaaggccttcgaggtcatcgccaccgagcgggcccgcatggagcagaccatcgcggacgtgaagcggcaggccgccgaggacgccttcctggtcatcaacgagcaggaggagagcacggagaactgctggaactgcgggcgcaaggcctccgagacctgcagcggctgcaacatcgcgcggtactgcgggagcttctgccagcacaaggactgggagcgccaccaccggctctgcggccagaacctgcacggccagtccccgcacgggcagggccgccccctgctgcccgtggggcggggcagctccgcccgcagcgccgactgctccgtgcccagccccgccctcgacaagacctccgccaccacgagccgctccagcacccccgcgtccgtcaccgccatcgacaccaacgggctgtgaggactagtccctgttcccagagcccacttttttttctttttttgaaataaaatagcctgtctttcagatctcaaaggctcttttcagagccaccaaaaaaaaaaaaaaaaaaaaaaaaaaaaaaaaaaaaaaaaaaaaaaaaaaaaaaaaaaaaaaaaaaaaaaaaaaaaaaaaaaaaaaaaaaaaaaaaaaaaagaatt

SEQ ID NO: 1188 - RNA, 1639 nt, synthetic construct
  misc_feature 1..1639: note = Homo sapiens__Q01196-1__RUNX1(K83E_R174Q) mRNA opt1
  source 1..1639: mol_type = other RNA
aggagagtcccgcagtcggcgtccagcggctctgcttgttcgtgtgtgtgtcgttgcaggccttattcaagcttaccatgcgcatccccgtggacgccagcacctcccggcgcttcaccccgcccagcacggccctgtcccccggcaagatgagcgaggcgctccccctgggggccccggacgccggcgccgccctggcggggaagctccggtccggcgaccgcagcatggtcgaggtgctggccgaccaccccggggagctggtgcggaccgactcccccaacttcctctgcagcgtcctgcccacccactggcgctgcaacgagaccctgccgatcgccttcaaggtggtggccctcggcgacgtccccgacggcacgctggtgaccgtgatggcggggaacgacgagaactactccgccgagctgcggaacgccaccgccgccatgaagaaccaggtcgcgcgcttcaacgacctccggttcgtgggccgcagcgggcggggcaagtccttcaccctgacgatcaccgtgttcaccaacccgccccaggtcgccacctaccaccgcgccatcaagatcacggtggacgggccccaggagccccggcgccaccggcagaagctggacgaccagaccaagcccggcagcctctccttcagcgagcgcctgtccgagctggagcagctccggcgcaccgccatgcgggtgagcccccaccacccggcccccacccccaacccccgcgcgtccctgaaccacagcacggccttcaacccgcagccccagtcccagatgcaggacacccggcagatccagcccagcccgccctggagctacgaccagtcctaccagtacctgggcagcatcgcctcccccagcgtccaccccgccacccccatctccccggggcgcgccagcggcatgaccacgctctccgcggagctgagctcccgcctgagcaccgcccccgacctcaccgccttctccgacccccggcagttcccggccctgcccagcatctccgacccccgcatgcactaccccggggccttcacctacagcccgacgcccgtgacctccggcatcggcatcgggatgagcgcgatgggctccgccacccggtaccacacctacctgcccccgccctaccccgggagctcccaggcccagggcgggcccttccaggccagcagcccctcctaccacctctactacggcgcgagcgccggctcctaccagttcagcatggtcgggggcgagcgctccccgccccggatcctgccgccctgcacgaacgccagcaccgggtccgccctgctcaaccccagcctgcccaaccagtccgacgtggtggaggccgagggcagccactccaacagccccaccaacatggcgccctccgcccgcctggaggaggccgtgtggcggccgtactgaggactagtccctgttcccagagcccacttttttttctttttttgaaataaaatagcctgtctttcagatctcaaaggctcttttcagagccaccaaaaaaaaaaaaaaaaaaaaaaaaaaaaaaaaaaaaaaaaaaaaaaaaaaaaaaaaaaaaaaaaaaaaaaaaaaaaaaaaaaaaaaaaaaaaaaaaaaaaagaatt

SEQ ID NO: 1189 - RNA, 2113 nt, synthetic construct
  misc_feature 1..2113: note = Homo sapiens____CBFbeta(1-165)_SMMHC(1527-1972) mRNA opt1
  source 1..2113: mol_type = other RNA
aggagagtcccgcagtcggcgtccagcggctctgcttgttcgtgtgtgtgtcgttgcaggccttattcaagcttaccatgccccgcgtggtcccggaccagcggagcaagttcgagaacgaggagttcttccgcaagctgtcccgggagtgcgagatcaagtacaccggcttccgcgaccggccccacgaggagcgccaggcccggttccagaacgcctgccgcgacgggcggagcgagatcgcgttcgtggccaccggcacgaacctctccctgcagttcttccccgccagctggcagggggagcagcgccagaccccctcccgggagtacgtggacctggagcgcgaggccggcaaggtctacctcaaggccccgatgatcctgaacggggtgtgcgtgatctggaagggctggatcgacctgcagcggctcgacggcatggggtgcctggagttcgacgaggagcgcgcgcagcaggaggacgccctggcccagcaggccttcgaggaggcgcggcgccggacccgcgagttcgaggaccgggaccgcagccaccgggaggagatggaggtccacgagctcgagaagtccaagcgcgccctggagacccagatggaggagatgaagacgcagctggaggagctcgaggacgagctgcaggccaccgaggacgccaagctgcgcctcgaggtgaacatgcaggccctgaagggccagttcgagcgggacctgcaggcgcgcgacgagcagaacgaggagaagcggcgccagctccagcggcagctgcacgagtacgagaccgagctggaggacgagcgcaagcagcgggccctcgccgccgccgcgaagaagaagctggagggggacctgaaggacctcgagctgcaggccgacagcgccatcaagggccgcgaggaggccatcaagcagctgcggaagctccaggcccagatgaaggacttccagcgcgagctggaggacgcgcgggcctcccgcgacgagatcttcgccaccgccaaggagaacgagaagaaggccaagagcctggaggcggacctcatgcagctgcaggaggacctggccgccgccgagcgggcgcgcaagcaggccgacctcgagaaggaggagctggccgaggagctggcctccagcctctccgggcggaacgccctgcaggacgagaagcgccggctggaggcgcgcatcgcccagctcgaggaggagctggaggaggagcagggcaacatggaggccatgagcgaccgggtgcgcaaggccacgcagcaggccgagcagctgtccaacgagctcgcgaccgagcgcagcaccgcccagaagaacgagtccgcccggcagcagctggagcgccagaacaaggagctgcggagcaagctccacgagatggagggcgccgtcaagtccaagttcaagagcaccatcgccgcgctggaggccaagatcgcccagctggaggagcaggtcgagcaggaggcccgcgagaagcaggcggccaccaagagcctgaagcagaaggacaagaagctcaaggagatcctgctccaggtggaggacgagcggaagatggccgagcagtacaaggagcaggccgagaaggggaacgcccgcgtgaagcagctgaagcggcagctggaggaggcggaggaggagtcccagcgcatcaacgccaaccggcgcaagctgcagcgggagctcgacgaggccacggagagcaacgaggccatgggccgcgaggtgaacgccctgaagtccaagctgcggcgcgggaacgagaccagcttcgtgccctcccggcgcagcggcggccggcgcgtcatcgagaacgcggacgggtccgaggaggagaccgacacgcgggacgccgacttcaacggcaccaaggccagcgagtgaggactagtccctgttcccagagcccacttttttttctttttttgaaataaaatagcctgtctttcagatctcaaaggctcttttcagagccaccaaaaaaaaaaaaaaaaaaaaaaaaaaaaaaaaaaaaaaaaaaaaaaaaaaaaaaaaaaaaaaaaaaaaaaaaaaaaaaaaaaaaaaaaaaaaaaaaaaaaagaatt

SEQ ID NO: 1190 - RNA, 1828 nt, synthetic construct
  misc_feature 1..1828: note = Artificial____CBFbeta(1-165)_SMMHC(1527-1877) mRNA opt1
  source 1..1828: mol_type = other RNA
aggagagtcccgcagtcggcgtccagcggctctgcttgttcgtgtgtgtgtcgttgcaggccttattcaagcttaccatgccccgcgtggtgccggaccagcggagcaagttcgagaacgaggagttcttccgcaagctgtcccgggagtgcgagatcaagtacacgggcttccgcgaccggccccacgaggagcgccaggcccggttccagaacgcctgccgcgacgggcggagcgagatcgcgttcgtggccaccggcacgaacctgtccctgcagttcttccccgccagctggcagggggagcagcgccagaccccctcccgggagtacgtggacctggagcgcgaggccggcaaggtctacctcaaggccccgatgatcctgaacggggtgtgcgtgatctggaagggctggatcgacctgcagcggctcgacggcatggggtgcctggagttcgacgaggagcgcgcgcagcaggaggacgccctggcccagcaggccttcgaggaggcgcggcgccggacccgcgagttcgaggaccgggaccgcagccaccgggaggagatggaggtccacgagctcgagaagtccaagcgcgccctggagacccagatggaggagatgaagacgcagctggaggagctcgaggacgagctgcaggccaccgaggacgccaagctgcgcctcgaggtgaacatgcaggccctgaagggccagttcgagcgggacctgcaggcgcgcgacgagcagaacgaggagaagcggcgccagctccagcggcagctgcacgagtacgagaccgagctggaggacgagcgcaagcagcgggccctcgccgccgccgcgaagaagaagctggagggggacctgaaggacctcgagctgcaggccgacagcgccatcaagggccgcgaggaggccatcaagcagctgcggaagctccaggcccagatgaaggacttccagcgcgagctggaggacgcgcgggcctcccgcgacgagatcttcgccaccgccaaggagaacgagaagaaggccaagagcctggaggcggacctcatgcagctgcaggaggacctggccgccgccgagcgggcgcgcaagcaggccgacctcgagaaggaggagctggccgaggagctggcctccagcctctccgggcggaacgccctgcaggacgagaagcgccggctggaggcgcgcatcgcccagctcgaggaggagctggaggaggagcagggcaacatggaggccatgagcgaccgggtgcgcaaggccacgcagcaggccgagcagctgtccaacgagctcgcgaccgagcgcagcaccgcccagaagaacgagtccgcccggcagcagctggagcgccagaacaaggagctgcggagcaagctccacgagatggagggcgccgtcaagtccaagttcaagagcaccatcgccgcgctggaggccaagatcgcccagctggaggagcaggtcgagcaggaggcccgcgagaagcaggcggccaccaagagcctgaagcagaaggacaagaagctcaaggagatcctgctccaggtggaggacgagcggaagatggccgagcagtacaaggagcaggccgagaaggggaacgcctgaggactagtccctgttcccagagcccacttttttttctttttttgaaataaaatagcctgtctttcagatctcaaaggctcttttcagagccaccaaaaaaaaaaaaaaaaaaaaaaaaaaaaaaaaaaaaaaaaaaaaaaaaaaaaaaaaaaaaaaaaaaaaaaaaaaaaaaaaaaaaaaaaaaaaaaaaaaaaagaatt

SEQ ID NO: 1191 - RNA, 889 nt, synthetic construct
  misc_feature 1..889: note = Artificial____CBFbeta(1-165)_Linker_Lifeact mRNA opt1
  source 1..889: mol_type = other RNA
aggagagtcccgcagtcggcgtccagcggctctgcttgttcgtgtgtgtgtcgttgcaggccttattcaagcttaccatgccccgcgtggtccccgaccagcggagcaagttcgagaacgaggagttcttccgcaagctgtcccgggagtgcgagatcaagtacaccggcttccgcgaccggccccacgaggagcgccaggcccggttccagaacgcctgccgcgacgggcggagcgagatcgcgttcgtggccaccggcacgaacctctccctgcagttcttccccgccagctggcagggggagcagcgccagaccccctcccgggagtacgtggacctggagcgcgaggccggcaaggtctacctcaaggccccgatgatcctgaacggggtgtgcgtgatctggaagggctggatcgacctgcagcggctcgacggcatggggtgcctggagttcgacgaggagcgcgcgcagcaggaggacgccctggcccagcaggccttcgaggaggcgcggcgccggacccgcgagttcgaggaccgggaccgcagccaccgggaggagatggagggcgggtccggcgggagcggcggctccgggggcagcgggggcggcggggtcgccgacctcatcaagaagttcgagtccatcagcaaggaggagggcgacccgcccgtggccacctgaggactagtccctgttcccagagcccacttttttttctttttttgaaataaaatagcctgtctttcagatctcaaaggctcttttcagagccaccaaaaaaaaaaaaaaaaaaaaaaaaaaaaaaaaaaaaaaaaaaaaaaaaaaaaaaaaaaaaaaaaaaaaaaaaaaaaaaaaaaaaaaaaaaaaaaaaaaaaagaatt

SEQ ID NO: 1192 - RNA, 856 nt, synthetic construct
  misc_feature 1..856: note = Artificial____CBFbeta(1-165)_HIF1alpha(549-575) mRNA opt1
  source 1..856: mol_type = other RNA
aggagagtcccgcagtcggcgtccagcggctctgcttgttcgtgtgtgtgtcgttgcaggccttattcaagcttaccatgccccgcgtggtcccggaccagcggagcaagttcgagaacgaggagttcttccgcaagctgtcccgggagtgcgagatcaagtacaccggcttccgcgaccggccccacgaggagcgccaggcccggttccagaacgcctgccgcgacgggcggagcgagatcgcgttcgtggccaccggcacgaacctctccctgcagttcttccccgccagctggcagggggagcagcgccagaccccctcccgggagtacgtggacctggagcgcgaggccggcaaggtctacctcaaggccccgatgatcctgaacggggtgtgcgtgatctggaagggctggatcgacctgcagcggctcgacggcatggggtgcctggagttcgacgaggagcgcgcgcagcaggaggacgccctggcccagcaggccttcgaggaggcgcggcgccggacccgcgagttcgaggaccgggaccgcagccaccgggaggagatggagcccttctccacccaggacacggacctcgacctggagatgctggccccctacatccccatggacgacgacttccagctccgctgaggactagtccctgttcccagagcccacttttttttctttttttgaaataaaatagcctgtctttcagatctcaaaggctcttttcagagccaccaaaaaaaaaaaaaaaaaaaaaaaaaaaaaaaaaaaaaaaaaaaaaaaaaaaaaaaaaaaaaaaaaaaaaaaaaaaaaaaaaaaaaaaaaaaaaaaaaaaaagaatt

SEQ ID NO: 1193 - RNA, 901 nt, synthetic construct
  misc_feature 1..901: note Artificial____CBFbeta(1-165)_Linker_HIF1alpha(549-575) mRNA opt1
  source 1..901: mol_type = other RNA
aggagagtcccgcagtcggcgtccagcggctctgcttgttcgtgtgtgtgtcgttgcaggccttattcaagcttaccatgccccgcgtggtcccggaccagcggagcaagttcgagaacgaggagttcttccgcaagctgtcccgggagtgcgagatcaagtacaccggcttccgcgaccggccccacgaggagcgccaggcccggttccagaacgcctgccgcgacgggcggagcgagatcgcgttcgtggccaccggcacgaacctctccctgcagttcttccccgccagctggcagggggagcagcgccagaccccctcccgggagtacgtggacctggagcgcgaggccggcaaggtctacctcaaggccccgatgatcctgaacggggtgtgcgtgatctggaagggctggatcgacctgcagcggctcgacggcatggggtgcctggagttcgacgaggagcgcgcgcagcaggaggacgccctggcccagcaggccttcgaggaggcgcggcgccggacccgcgagttcgaggaccgggaccgcagccaccgggaggagatggagggcgggtccggcgggagcggcggctccgggggcagcgggggcggccccttctccacccaggacacggacctcgacctggagatgctggccccctacatccccatggacgacgacttccagctccgctgaggactagtccctgttcccagagcccacttttttttctttttttgaaataaaatagcctgtctttcagatctcaaaggctcttttcagagccaccaaaaaaaaaaaaaaaaaaaaaaaaaaaaaaaaaaaaaaaaaaaaaaaaaaaaaaaaaaaaaaaaaaaaaaaaaaaaaaaaaaaaaaaaaaaaaaaaaaaaagaatt

SEQ ID NO: 1194 - RNA, 2536 nt, synthetic construct
  misc_feature 1..2536: note = Artificial____RUNX1(1-177)_N_RUNX1T1a(31-604) mRNA opt1
  source 1..2536: mol_type = other RNA
aggagagtcccgcagtcggcgtccagcggctctgcttgttcgtgtgtgtgtcgttgcaggccttattcaagcttaccatgcgcatccccgtggacgccagcacctcccggcgcttcaccccgcccagcacggccctgtcccccggcaagatgagcgaggcgctccccctgggggccccggacgccggcgccgccctggcggggaagctccggtccggcgaccgcagcatggtcgaggtgctggccgaccaccccggggagctggtgcggaccgactcccccaacttcctctgcagcgtcctgcccacccactggcgctgcaacaagaccctgccgatcgccttcaaggtggtggccctcggcgacgtccccgacggcacgctggtgaccgtgatggcggggaacgacgagaactactccgccgagctgcggaacgccaccgccgccatgaagaaccaggtcgcgcgcttcaacgacctccggttcgtgggccgcagcgggcggggcaagtccttcaccctgacgatcaccgtgttcaccaaccccccccaggtcgccacctaccaccgcgccatcaagatcacggtggacgggccgcgggagccccgcaaccggaccgagaagcacagcaccatgcccgactcccccgtggacgtcaagacccagagccgcctgacgccgcccaccatgccccccccgcccaccacccagggcgccccccggacgtccagcttcacccccaccaccctcacgaacggcacctcccacagcccgaccgccctgaacggggcgccctccccccccaacggcttcagcaacgggccgagctccagctccagctccagcctggccaaccagcagctcccccccgcctgcggcgcccgccagctgtccaagctgaagcggttcctcaccacgctgcagcagttcggcaacgacatcagcccggagatcggggagcgcgtgcggaccctggtgctcggcctggtcaactccaccctgaccatcgaggagttccacagcaagctccaggaggccacgaacttccccctgcgccccttcgtgatccccttcctgaaggcgaacctcccgctgctgcagcgcgagctcctgcactgcgcccggctggccaagcagaaccccgcccagtacctcgcccagcacgagcagctgctgctcgacgcgtccaccaccagccccgtggactccagcgagctgctgctcgacgtcaacgagaacgggaagcgccggacccccgaccgcacgaaggagaacggcttcgaccgggagccgctgcactccgagcaccccagcaagcgcccctgcaccatctcccccgggcagcggtacagcccgaacaacggcctgtcctaccagcccaacggcctcccccaccccaccccgccccccccccagcactaccgcctggacgacatggccatcgcccaccactaccgggacagctaccgccacccgagccaccgggacctgcgcgaccggaaccgccccatggggctgcacggcacccggcaggaggagatgatcgaccaccgcctcaccgaccgggagtgggccgaggagtggaagcacctggaccacctgctcaactgcatcatggacatggtggagaagacgcgccggtccctgaccgtgctgcgccgctgccaggaggcggaccgggaggagctcaactactggatccgccggtacagcgacgccgaggacctgaagaaggggggcgggtccagctccagccactcccgccagcagagccccgtcaaccccgacccggtggccctggacgcccaccgggagttcctccaccgccccgcctccggctacgtccccgaggagatctggaagaaggcggaggaggccgtgaacgaggtgaagcggcaggccatgaccgagctgcagaaggccgtcagcgaggccgagcgcaaggcgcacgacatgatcaccacggagcgggccaagatggagcgcaccgtggccgaggccaagcggcaggccgcggaggacgccctggccgtgatcaaccagcaggaggactccagcgagtcctgctggaactgcggccgcaaggccagcgagacctgctccgggtgcaacaccgcgcggtactgcggcagcttctgccagcacaaggactgggagaagcaccaccacatctgcgggcagacgctccaggcccagcagcagggcgacaccccggccgtctccagcagcgtgacccccaactccggggccggcagccccatggacacccccccggccgcgacgccccgctccaccacccccggcacccccagcacgatcgagaccaccccgcggtgaggactagtccctgttcccagagcccacttttttttctttttttgaaataaaatagcctgtctttcagatctcaaaggctcttttcagagccaccaaaaaaaaaaaaaaaaaaaaaaaaaaaaaaaaaaaaaaaaaaaaaaaaaaaaaaaaaaaaaaaaaaaaaaaaaaaaaaaaaaaaaaaaaaaaaaaaaaaaagaatt

SEQ ID NO: 1195 - RNA, 1051 nt, synthetic construct
  misc_feature 1..1051: note = Artificial____RUNX1(1-241)_RUNX1T1b(short) mRNA opt1
  source 1..1051: mol_type = other RNA
aggagagtcccgcagtcggcgtccagcggctctgcttgttcgtgtgtgtgtcgttgcaggccttattcaagcttaccatgcgcatccccgtggacgccagcacctcccggcgcttcaccccgcccagcacggccctgtcccccggcaagatgagcgaggcgctccccctgggggccccggacgccggcgccgccctggcggggaagctccggtccggcgaccgcagcatggtcgaggtgctggccgaccaccccggggagctggtgcggaccgactcccccaacttcctctgcagcgtcctgcccacccactggcgctgcaacaagaccctgccgatcgccttcaaggtggtggccctcggcgacgtccccgacggcacgctggtgaccgtgatggcggggaacgacgagaactactccgccgagctgcggaacgccaccgccgccatgaagaaccaggtcgcgcgcttcaacgacctccggttcgtgggccgcagcgggcggggcaagtccttcaccctgacgatcaccgtgttcaccaacccgccccaggtcgccacctaccaccgcgccatcaagatcacggtggacgggccccgggagccccgccggcaccgccagaagctggacgaccagaccaagcccggcagcctctccttcagcgagcggctgtccgagctggagcagctccgccggaccgccatgcgcgtgagcccccaccacccggcccccacccccaacccccgggcgtccctgaaccacagcacggccttcaacccgcagccccagtcccagatgcaggaggtcggcttctgccacgtggcccaggtggggctgaagctcctgggctgaggactagtccctgttcccagagcccacttttttttctttttttgaaataaaatagcctgtctttcagatctcaaaggctcttttcagagccaccaaaaaaaaaaaaaaaaaaaaaaaaaaaaaaaaaaaaaaaaaaaaaaaaaaaaaaaaaaaaaaaaaaaaaaaaaaaaaaaaaaaaaaaaaaaaaaaaaaaaagaatt

SEQ ID NO: 1196 - RNA, 2755 nt, synthetic construct
  misc_feature 1..2755: note = Artificial____RUNX1(1-241)_V_RUNX1T1b(22-604) mRNA opt1
  source 1..2755: mol_type = other RNA
aggagagtcccgcagtcggcgtccagcggctctgcttgttcgtgtgtgtgtcgttgcaggccttattcaagcttaccatgcgcatccccgtggacgccagcacctcccggcgcttcaccccgcccagcacggccctgtcccccggcaagatgagcgaggcgctccccctgggggccccggacgccggcgccgccctggcggggaagctccggtccggcgaccgcagcatggtcgaggtgctggccgaccaccccggggagctggtgcggaccgactcccccaacttcctctgcagcgtcctgcccacccactggcgctgcaacaagaccctgccgatcgccttcaaggtggtggccctcggcgacgtccccgacggcacgctggtgaccgtgatggcggggaacgacgagaactactccgccgagctgcggaacgccaccgccgccatgaagaaccaggtcgcgcgcttcaacgacctccggttcgtgggccgcagcgggcggggcaagtccttcaccctgacgatcaccgtgttcaccaacccgccccaggtcgccacctaccaccgcgccatcaagatcacggtggacgggccccgggagccccgccggcaccgccagaagctggacgaccagaccaagcccggcagcctctccttcagcgagcggctgtccgagctggagcagctccgccggaccgccatgcgcgtgagcccccaccacccggcccccacccccaacccccgggcgtccctgaaccacagcacggccttcaacccgcagccccagtcccagatgcaggtcggccccgagaagcgcgtgcccgccatgccggggagccccgtggaggtcaagatccagagccgctccagcccgcccaccatgccgcccctgcccccgatcaaccccggcgggccccggcccgtgtccttcacccccaccgccctcagcaacggcatcaaccactccccgcccacgctgaacggcgcccccagcccgccccagcgcttctccaacgggcccgcgagctccaccagctccgccctgaccaaccagcagctccccgcgacctgcggcgcccggcagctgagcaagctgaagcgcttcctcacgaccctgcagcagttcgggaacgacatctcccccgagatcggcgagaaggtgcggaccctggtcctcgccctggtgaacagcaccgtgacgatcgaggagttccactgcaagctgcaggaggccaccaacttccccctccgccccttcgtcatccccttcctgaaggccaacctgccgctcctgcagcgggagctgctccactgcgcccgcgccgcgaagcagaccccctcccagtacctggcccagcacgagcacctcctgctgaacaccagcatcgcctcccccgccgacagctccgagctgctcatggaggtgcacgggaacggcaagcggcccagcccggagcgccgggaggagaacagcttcgaccgcgacacgatcgcccccgagccgcccgcgaagcgggtctgcaccatctcccccgcgccccgccacagccccgccctgaccgtgccgctgatgaaccccggcgggcagttccaccccacgcccccgcccctgcagcactacaccctcgaggacatcgccacctcccacctgtaccgggagcccaacaagatgctggagcaccgcgaggtgcgggaccgccaccacagcctcggcctgaacgggggctaccaggacgagctggtcgaccaccggctcaccgagcgcgagtgggccgacgagtggaagcacctggaccacgccctgaactgcatcatggagatggtggagaagacccgccggtccatggccgtgctccgccggtgccaggagagcgaccgcgaggagctgaactactggaagcggcgctacaacgagaacaccgagctgcggaagacggggaccgagctcgtctcccgccagcacagccccggctccgccgacagcctgtccaacgacagccagcgggagttcaactcccgcccgggcaccgggtacgtgcccgtggagttctggaagaagaccgaggaggccgtcaacaaggtgaagatccaggccatgagcgaggtgcagaaggcggtcgccgaggccgagcagaaggccttcgaggtgatcgcgacggagcgggcccgcatggagcagaccatcgccgacgtgaagcggcaggccgccgaggacgcgttcctggtcatcaacgagcaggaggagtccaccgagaactgctggaactgcggccgcaaggccagcgagacctgctccgggtgcaacatcgcccggtactgcggcagcttctgccagcacaaggactgggagcgccaccaccggctctgcgggcagaacctgcacggccagagcccccacggccaggggcgccccctgctcccggtgggccgggggtccagcgcccgctccgccgactgcagcgtgccctcccccgcgctggacaagacgagcgccaccacctcccggagctccacccccgccagcgtcacggccatcgacaccaacggcctgtgaggactagtccctgttcccagagcccacttttttttctttttttgaaataaaatagcctgtctttcagatctcaaaggctcttttcagagccaccaaaaaaaaaaaaaaaaaaaaaaaaaaaaaaaaaaaaaaaaaaaaaaaaaaaaaaaaaaaaaaaaaaaaaaaaaaaaaaaaaaaaaaaaaaaaaaaaaaaaagaatt

SEQ ID NO: 1197 - RNA, 2755 nt, synthetic construct
  misc_feature 1..2755: note = Artificial____RUNX1(1-241)_I_RUNX1T1b(22-604) mRNA opt1
  source 1..2755: mol_type = other RNA
aggagagtcccgcagtcggcgtccagcggctctgcttgttcgtgtgtgtgtcgttgcaggccttattcaagcttaccatgcgcatccccgtggacgccagcacctcccggcgcttcaccccgcccagcacggccctgtcccccggcaagatgagcgaggcgctccccctgggggccccggacgccggcgccgccctggcggggaagctccggtccggcgaccgcagcatggtcgaggtgctggccgaccaccccggggagctggtgcggaccgactcccccaacttcctctgcagcgtcctgcccacccactggcgctgcaacaagaccctgccgatcgccttcaaggtggtggccctcggcgacgtccccgacggcacgctggtgaccgtgatggcggggaacgacgagaactactccgccgagctgcggaacgccaccgccgccatgaagaaccaggtcgcgcgcttcaacgacctccggttcgtgggccgcagcgggcggggcaagtccttcaccctgacgatcaccgtgttcaccaacccgccccaggtcgccacctaccaccgcgccatcaagatcacggtggacgggccccgggagccccgccggcaccgccagaagctggacgaccagaccaagcccggcagcctctccttcagcgagcggctgtccgagctggagcagctccgccggaccgccatgcgcgtgagcccccaccacccggcccccacccccaacccccgggcgtccctgaaccacagcacggccttcaacccgcagccccagtcccagatgcagatcggccccgagaagcgcgtccccgccatgccggggagccccgtggaggtgaagatccagagccgctccagcccgcccaccatgccgcccctgcccccgatcaaccccggcgggccccggcccgtctccttcacccccaccgccctcagcaacggcatcaaccactccccgcccacgctgaacggcgcccccagcccgccccagcgcttctccaacgggcccgcgagctccaccagctccgccctgaccaaccagcagctccccgcgacctgcggcgcccggcagctgagcaagctgaagcgcttcctcacgaccctgcagcagttcgggaacgacatctcccccgagatcggcgagaaggtgcggaccctggtgctcgccctggtcaacagcaccgtgacgatcgaggagttccactgcaagctgcaggaggccaccaacttccccctccgccccttcgtgatccccttcctgaaggccaacctgccgctcctgcagcgggagctgctccactgcgcccgcgccgcgaagcagaccccctcccagtacctggcccagcacgagcacctcctgctgaacaccagcatcgcctcccccgccgacagctccgagctgctcatggaggtccacgggaacggcaagcggcccagcccggagcgccgggaggagaacagcttcgaccgcgacacgatcgcccccgagccgcccgcgaagcgggtgtgcaccatctcccccgcgccccgccacagccccgccctgaccgtcccgctgatgaaccccggcgggcagttccaccccacgcccccgcccctgcagcactacaccctcgaggacatcgccacctcccacctgtaccgggagcccaacaagatgctggagcaccgcgaggtgcgggaccgccaccacagcctcggcctgaacgggggctaccaggacgagctggtggaccaccggctcaccgagcgcgagtgggccgacgagtggaagcacctggaccacgccctgaactgcatcatggagatggtcgagaagacccgccggtccatggccgtgctccgccggtgccaggagagcgaccgcgaggagctgaactactggaagcggcgctacaacgagaacaccgagctgcggaagacggggaccgagctcgtgtcccgccagcacagccccggctccgccgacagcctgtccaacgacagccagcgggagttcaactcccgcccgggcaccgggtacgtccccgtggagttctggaagaagaccgaggaggccgtgaacaaggtcaagatccaggccatgagcgaggtgcagaaggcggtggccgaggccgagcagaaggccttcgaggtcatcgcgacggagcgggcccgcatggagcagaccatcgccgacgtgaagcggcaggccgccgaggacgcgttcctggtgatcaacgagcaggaggagtccaccgagaactgctggaactgcggccgcaaggccagcgagacctgctccgggtgcaacatcgcccggtactgcggcagcttctgccagcacaaggactgggagcgccaccaccggctctgcgggcagaacctgcacggccagagcccccacggccaggggcgccccctgctcccggtcggccgggggtccagcgcccgctccgccgactgcagcgtgccctcccccgcgctggacaagacgagcgccaccacctcccggagctccacccccgccagcgtgacggccatcgacaccaacggcctgtgaggactagtccctgttcccagagcccacttttttttctttttttgaaataaaatagcctgtctttcagatctcaaaggctcttttcagagccaccaaaaaaaaaaaaaaaaaaaaaaaaaaaaaaaaaaaaaaaaaaaaaaaaaaaaaaaaaaaaaaaaaaaaaaaaaaaaaaaaaaaaaaaaaaaaaaaaaaaaagaatt

SEQ ID NO: 1198 - RNA, 1639 nt, synthetic construct
  misc_feature 1..1639: note = Homo sapiens__Q01196-1__RUNX1(K83E_R174Q) mRNA opt3
  source 1..1639: mol_type = other RNA
aggagagtcccgcagtcggcgtccagcggctctgcttgttcgtgtgtgtgtcgttgcaggccttattcaagcttaccatgagaatccccgtggatgccagcaccagcagaagattcacccctcctagcaccgctctgagccctggcaagatgtctgaagctctgcctctgggagcacctgatgctggtgcagctctggccggaaaactgagaagcggcgacagatccatggtggaagtgctggctgatcaccccggcgaacttgtgcggacagacagccctaatttcctgtgcagcgtgctgcctacacactggcggtgcaatgagacactgcctatcgccttcaaggtggtggccctgggagatgtgcctgatggcacactggttacagtgatggccggcaacgacgagaactacagcgccgagctgagaaatgccaccgccgccatgaagaaccaggtggccagattcaacgacctgagattcgtgggcagaagcggcaggggcaagagctttaccctgaccatcaccgtgttcaccaatcctccacaggtggcaacctaccaccgggccatcaagatcacagtggacggccctcaagagcccagacggcacagacagaaactggacgaccagaccaagcctggcagcctgagctttagcgagagactgagcgagctggaacagctgagaagaaccgccatgcgggtgtccccacatcaccctgctcctacacctaatcctcgggccagcctgaatcacagcaccgcctttaatccccagcctcagagccagatgcaggacaccagacagattcagccttctccaccttggagctacgaccagagctaccagtacctgggctctatcgcctctcctagcgtgcaccctgccacacctattagtcctggcagagccagcggcatgacaacactgtctgccgagctgtccagcagactgagcacagcccctgatctgaccgccttcagcgaccctagacagttccctgctctgcccagcatctctgaccccagaatgcattaccctggcgccttcacatacagccccacacctgtgacaagcggcatcggcattggcatgtctgccatgggaagcgccaccagataccacacctacctgcctccaccttatcctggcagctctcaggctcaaggcggcccttttcaggccagctctccttcctaccacctgtactatggcgccagcgccggctcctaccagttttctatggttggaggcgagcggagccctcctagaatcctgcctccttgtaccaacgccagcacaggatctgccctgctgaatcccagcctgcctaatcagagcgacgtggtggaagccgagggcagccatagcaacagccctaccaatatggcccctagcgccagactggaagaggccgtttggaggccttactgaggactagtccctgttcccagagcccacttttttttctttttttgaaataaaatagcctgtctttcagatctcaaaggctcttttcagagccaccaaaaaaaaaaaaaaaaaaaaaaaaaaaaaaaaaaaaaaaaaaaaaaaaaaaaaaaaaaaaaaaaaaaaaaaaaaaaaaaaaaaaaaaaaaaaaaaaaaaaagaatt

SEQ ID NO: 1199 - RNA, 2113 nt, synthetic construct
  misc_feature 1..2113: note = Homo sapiens____CBFbeta(1-165)_SMMHC(1527-1972) mRNA opt3
  source 1..2113: mol_type = other RNA
aggagagtcccgcagtcggcgtccagcggctctgcttgttcgtgtgtgtgtcgttgcaggccttattcaagcttaccatgcctagagtggtgcccgaccagagaagcaagttcgagaacgaagagttctttcggaagctgagcagagagtgcgagatcaagtacaccggcttccgggacagaccccacgaagaaagacaggccagattccagaacgcctgcagagatggcagatccgagatcgcctttgtggccaccggcaccaatctgagcctgcagttctttccagcctcctggcagggcgagcagagacaaacacccagcagagaatacgtggacctggaacgcgaggccggcaaggtgtacctgaaggcccctatgatcctgaacggcgtgtgcgtgatctggaaaggctggatcgatctgcagcggctggatggcatgggctgcctggaatttgacgaggaaagagcccagcaagaggacgcccttgctcagcaggcctttgaggaagccagaaggcggaccagagagttcgaggacagagacagatcccaccgggaagagatggaagtgcacgagctggaaaagagcaagagagccctggaaacccagatggaagaaatgaagacccagctcgaggaactcgaggacgagctgcaggccacagaggatgccaagctgagactggaagtgaacatgcaggccctgaagggccagttcgagagagatctgcaggctagggacgagcagaacgaggaaaagcggagacagctgcagaggcagctgcacgagtacgagacagagctggaagatgagcggaagcagagagcactggccgctgccgccaagaagaaactggaaggcgacctgaaggatctggaactccaggccgacagcgccatcaagggaagagaagaggccatcaagcagctgcggaagctgcaagcccagatgaaggacttccagcgcgagttggaagatgccagagccagcagggatgagatcttcgccaccgccaaagagaacgagaagaaggccaagagcctggaagccgatctgatgcagctccaagaggatctggctgccgccgagagagccagaaaacaggccgacctggaaaaagaggaactggccgaagaactggccagcagcctgtctggcagaaacgctctgcaggacgagaagagaaggctggaagccaggatcgcccagttggaggaagaactcgaagaggaacagggcaacatggaagccatgagcgacagagtgcggaaggccacacagcaggctgagcagctgagcaatgagctggccaccgagagaagcacagcccagaagaatgagagcgccaggcagcagctcgagcggcagaacaaagagctgagaagcaaactgcacgaaatggaaggggccgtgaagtccaagttcaagagcacaatcgccgctctcgaggccaagatcgctcagctcgaagaacaggtggaacaagaggcccgggaaaagcaggccgccacaaagtctctgaagcagaaggacaagaagctgaaagaaatcctgctgcaggtcgaggatgagagaaagatggccgagcagtacaaagaacaggctgagaagggcaacgccagagtgaagcagctgaaacggcaactggaagaggccgaggaagagtcccagagaatcaacgccaacagacggaaactgcagagagagctggacgaagccaccgagtccaatgaggccatgggcagagaagtgaacgccctgaagtctaagctgcggagaggcaacgaaaccagcttcgtgcccagcagaagatccggcggcagaagagtgatcgagaacgccgatggctctgaggaagaaaccgacaccagagatgccgacttcaacggcacaaaggccagcgagtaaggactagtccctgttcccagagcccacttttttttctttttttgaaataaaatagcctgtctttcagatctcaaaggctcttttcagagccaccaaaaaaaaaaaaaaaaaaaaaaaaaaaaaaaaaaaaaaaaaaaaaaaaaaaaaaaaaaaaaaaaaaaaaaaaaaaaaaaaaaaaaaaaaaaaaaaaaaaaagaatt

SEQ ID NO: 1200 - RNA, 1828 nt, synthetic construct
  misc_feature 1..1828: note = Artificial____CBFbeta(1-165)_SMMHC(1527-1877) mRNA opt3
  source 1..1828: mol_type = other RNA
aggagagtcccgcagtcggcgtccagcggctctgcttgttcgtgtgtgtgtcgttgcaggccttattcaagcttaccatgcctagagtggtgcccgaccagagaagcaagttcgagaacgaagagttctttcggaagctgagcagagagtgcgagatcaagtacaccggcttccgggacagaccccacgaagaaagacaggccagattccagaacgcctgcagagatggcagatccgagatcgcctttgtggccaccggcaccaatctgagcctgcagttctttccagcctcctggcagggcgagcagagacaaacacccagcagagaatacgtggacctggaacgcgaggccggcaaggtgtacctgaaggcccctatgatcctgaacggcgtgtgcgtgatctggaaaggctggatcgatctgcagcggctggatggcatgggctgcctggaatttgacgaggaaagagcccagcaagaggacgcccttgctcagcaggcctttgaggaagccagaaggcggaccagagagttcgaggacagagacagatcccaccgggaagagatggaagtgcacgagctggaaaagagcaagagagccctggaaacccagatggaagaaatgaagacccagctcgaggaactcgaggacgagctgcaggccacagaggatgccaagctgagactggaagtgaacatgcaggccctgaagggccagttcgagagagatctgcaggctagggacgagcagaacgaggaaaagcggagacagctgcagaggcagctgcacgagtacgagacagagctggaagatgagcggaagcagagagcactggccgctgccgccaagaagaaactggaaggcgacctgaaggatctggaactccaggccgacagcgccatcaagggaagagaagaggccatcaagcagctgcggaagctgcaagcccagatgaaggacttccagcgcgagttggaagatgccagagccagcagggatgagatcttcgccaccgccaaagagaacgagaagaaggccaagagcctggaagccgatctgatgcagctccaagaggatctggctgccgccgagagagccagaaaacaggccgacctggaaaaagaggaactggccgaagaactggccagcagcctgtctggcagaaacgctctgcaggacgagaagagaaggctggaagccaggatcgcccagttggaggaagaactcgaagaggaacagggcaacatggaagccatgagcgacagagtgcggaaggccacacagcaggctgagcagctgagcaatgagctggccaccgagagaagcacagcccagaagaatgagagcgccaggcagcagctcgagcggcagaacaaagagctgagaagcaaactgcacgaaatggaaggggccgtgaagtccaagttcaagagcacaatcgccgctctcgaggccaagatcgctcagctcgaagaacaggtggaacaagaggcccgggaaaagcaggccgccacaaagtctctgaagcagaaggacaagaagctgaaagaaatcctgctgcaggtcgaggatgagagaaagatggccgagcagtacaaagaacaggctgagaagggcaacgcctgaggactagtccctgttcccagagcccacttttttttctttttttgaaataaaatagcctgtctttcagatctcaaaggctcttttcagagccaccaaaaaaaaaaaaaaaaaaaaaaaaaaaaaaaaaaaaaaaaaaaaaaaaaaaaaaaaaaaaaaaaaaaaaaaaaaaaaaaaaaaaaaaaaaaaaaaaaaaaagaatt

SEQ ID NO: 1201 - RNA, 889 nt, synthetic construct
  misc_feature 1..889: note = Artificial____CBFbeta(1-165)_Linker_Lifeact mRNA opt3
  source 1..889: mol_type = other RNA
aggagagtcccgcagtcggcgtccagcggctctgcttgttcgtgtgtgtgtcgttgcaggccttattcaagcttaccatgcctagagtggtgcccgaccagagaagcaagttcgagaacgaagagttctttcggaagctgagcagagagtgcgagatcaagtacaccggcttccgggacagaccccacgaagaaagacaggccagattccagaacgcctgcagagatggcagatccgagatcgcctttgtggccaccggcaccaatctgagcctgcagttctttccagcctcctggcagggcgagcagagacaaacacccagcagagaatacgtggacctggaacgcgaggccggcaaggtgtacctgaaggcccctatgatcctgaacggcgtgtgcgtgatctggaaaggctggatcgatctgcagcggctggatggcatgggctgcctggaatttgacgaggaaagagcccagcaagaggacgcccttgctcagcaggcctttgaggaagccagaaggcggaccagagagttcgaggacagagacagatcccaccgggaagagatggaaggcggatctggtggaagcggaggtagcggaggatcaggcggaggcggagttgccgatctgatcaagaagttcgagtccatcagcaaagaagagggcgaccctccagtggccacatgaggactagtccctgttcccagagcccacttttttttctttttttgaaataaaatagcctgtctttcagatctcaaaggctcttttcagagccaccaaaaaaaaaaaaaaaaaaaaaaaaaaaaaaaaaaaaaaaaaaaaaaaaaaaaaaaaaaaaaaaaaaaaaaaaaaaaaaaaaaaaaaaaaaaaaaaaaaaaagaatt

SEQ ID NO: 1202 - RNA, 856 nt, synthetic construct
  misc_feature 1..856: note = Artificial____CBFbeta(1-165)_HIF1alpha(549-575) mRNA opt3
  source 1..856: mol_type = other RNA
aggagagtcccgcagtcggcgtccagcggctctgcttgttcgtgtgtgtgtcgttgcaggccttattcaagcttaccatgcctagagtggtgcccgaccagagaagcaagttcgagaacgaagagttctttcggaagctgagcagagagtgcgagatcaagtacaccggcttccgggacagaccccacgaagaaagacaggccagattccagaacgcctgcagagatggcagatccgagatcgcctttgtggccaccggcaccaatctgagcctgcagttctttccagcctcctggcagggcgagcagagacaaacacccagcagagaatacgtggacctggaacgcgaggccggcaaggtgtacctgaaggcccctatgatcctgaacggcgtgtgcgtgatctggaaaggctggatcgatctgcagcggctggatggcatgggctgcctggaatttgacgaggaaagagcccagcaagaggacgcccttgctcagcaggcctttgaggaagccagaaggcggaccagagagttcgaggacagagacagatcccaccgggaagagatggaacccttcagcacccaagacaccgacctggacctcgaaatgctggccccttacatccccatggacgacgacttccagctgcggtaaggactagtccctgttcccagagcccacttttttttctttttttgaaataaaatagcctgtctttcagatctcaaaggctcttttcagagccaccaaaaaaaaaaaaaaaaaaaaaaaaaaaaaaaaaaaaaaaaaaaaaaaaaaaaaaaaaaaaaaaaaaaaaaaaaaaaaaaaaaaaaaaaaaaaaaaaaaaaagaatt

SEQ ID NO: 1203 - RNA, 901 nt, synthetic construct
  misc_feature 1..901: note Artificial____CBFbeta(1-165)_Linker_HIF1alpha(549-575) mRNA opt3
  source 1..901: mol_type = other RNA
aggagagtcccgcagtcggcgtccagcggctctgcttgttcgtgtgtgtgtcgttgcaggccttattcaagcttaccatgcctagagtggtgcccgaccagagaagcaagttcgagaacgaagagttctttcggaagctgagcagagagtgcgagatcaagtacaccggcttccgggacagaccccacgaagaaagacaggccagattccagaacgcctgcagagatggcagatccgagatcgcctttgtggccaccggcaccaatctgagcctgcagttctttccagcctcctggcagggcgagcagagacaaacacccagcagagaatacgtggacctggaacgcgaggccggcaaggtgtacctgaaggcccctatgatcctgaacggcgtgtgcgtgatctggaaaggctggatcgatctgcagcggctggatggcatgggctgcctggaatttgacgaggaaagagcccagcaagaggacgcccttgctcagcaggcctttgaggaagccagaaggcggaccagagagttcgaggacagagacagatcccaccgggaagagatggaaggcggatctggtggaagcggaggtagcggaggatctggcggaggacctttcagcacccaagacaccgacctggacctcgaaatgctggccccttacatccccatggacgacgacttccagctgcggtaaggactagtccctgttcccagagcccacttttttttctttttttgaaataaaatagcctgtctttcagatctcaaaggctcttttcagagccaccaaaaaaaaaaaaaaaaaaaaaaaaaaaaaaaaaaaaaaaaaaaaaaaaaaaaaaaaaaaaaaaaaaaaaaaaaaaaaaaaaaaaaaaaaaaaaaaaaaaaagaatt

SEQ ID NO: 1204 - RNA, 2536 nt, synthetic construct
  misc_feature 1..2536: note = Artificial____RUNX1(1-177)_N_RUNX1T1a(31-604) mRNA opt3
  source 1..2536: mol_type = other RNA
aggagagtcccgcagtcggcgtccagcggctctgcttgttcgtgtgtgtgtcgttgcaggccttattcaagcttaccatgagaatccccgtggatgccagcaccagcagaagattcacccctcctagcaccgctctgagccctggcaagatgtctgaagctctgcctctgggagcacctgatgctggtgcagctctggccggaaaactgagaagcggcgacagatccatggtggaagtgctggctgatcaccccggcgaacttgtgcggacagacagccctaatttcctgtgcagcgtgctgcctacacactggcggtgcaacaagacactgcctatcgccttcaaggtggtggctctgggagatgtgcctgatggcacactggtcacagtgatggccggcaacgacgagaattacagcgccgagctgagaaatgccaccgccgccatgaagaaccaggtggccagattcaacgacctgagattcgtgggcagaagcggcaggggcaagagctttaccctgaccatcaccgtgttcaccaatcctccacaggtggcaacctaccaccgggccatcaagatcaccgtggatggccctagagagccccggaacagaacagagaagcacagcaccatgcctgacagccccgtggacgtgaaaacccagagcagactgacccctccaaccatgcctcctccacctacaacacagggcgctcctagaaccagcagcttcacccctaccacactgaccaacggcacctctcacagccccacagctcttaatggcgccccttctccacctaacggcttcagcaatggcccaagcagcagcagctctagcagcctggctaatcagcagctgcctcctgcttgtggcgctagacagctgagcaagctgaagcggttcctgaccacactgcagcagttcggcaacgatatcagccccgagatcggcgagcgcgtcagaacactggttctgggcctcgtgaatagcaccctgacaatcgaagagttccacagcaagctgcaagaggccaccaactttccgctgcggcctttcgtgatcccattcctgaaggccaacctgcctctgctgcagagagaactgctccactgcgccagactggccaagcagaaccctgctcagtatctggcccagcacgagcaactgctgctggacgcctctacaacaagccctgtggatagcagcgagctgctcctggatgtgaacgagaacggcaagcggagaacccctgaccggaccaaagagaacggcttcgacagagagcctctgcacagcgagcaccccagcaaaagaccctgcacaatcagccctggccagcggtactctcccaacaacggcctgagctaccagcctaacggactgccccatcctacacctccacctccacagcactaccggctggacgatatggctatcgcccaccactaccgggacagctacagacaccctagccaccgggacctgcgggacagaaatagacctatgggcctgcacggcacccggcaagaggaaatgattgaccaccggctgaccgacagagaatgggccgaagagtggaagcacctggaccatctgctgaactgcatcatggatatggtggaaaagacccggcggagcctgaccgtgctgagaagatgtcaagaggccgatagagaggaactgaactactggatccggcggtacagcgacgccgaggatcttaagaaaggcggcggatctagcagcagccacagcagacagcagagccccgtgaatcctgatcctgtggcactggatgcccacagagaatttctgcacagacccgccagcggctacgtgccagaggaaatctggaagaaagccgaagaggccgtgaacgaagtgaagagacaggccatgaccgaactgcagaaagccgtgtctgaggccgagagaaaggcccacgatatgatcacaaccgagcgggccaagatggaaagaacagtggccgaggccaaaagacaggccgccgaagatgctctggctgtgatcaatcagcaagaggacagcagcgagtcctgctggaactgtggcagaaaggccagcgagacatgcagcggctgtaacaccgccagatattgcggcagcttctgccagcacaaggactgggagaagcaccaccacatctgcggccagacactgcaggctcagcagcaaggcgatactcctgccgtgtctagcagcgtgacccctaattctggcgccggatctcccatggatacccctccagctgccacacctagaagcacaacccctggcacacccagcaccatcgagacaacccctagatgaggactagtccctgttcccagagcccacttttttttctttttttgaaataaaatagcctgtctttcagatctcaaaggctcttttcagagccaccaaaaaaaaaaaaaaaaaaaaaaaaaaaaaaaaaaaaaaaaaaaaaaaaaaaaaaaaaaaaaaaaaaaaaaaaaaaaaaaaaaaaaaaaaaaaaaaaaaaaagaatt

SEQ ID NO: 1205 - RNA, 1051 nt, synthetic construct
  misc_feature 1..1051: note = Artificial____RUNX1(1-241)_RUNX1T1b(short) mRNA opt3
  source 1..1051: mol_type = other RNA
aggagagtcccgcagtcggcgtccagcggctctgcttgttcgtgtgtgtgtcgttgcaggccttattcaagcttaccatgagaatccccgtggatgccagcaccagcagaagattcacccctcctagcaccgctctgagccctggcaagatgtctgaagctctgcctctgggagcacctgatgctggtgcagctctggccggaaaactgagaagcggcgacagatccatggtggaagtgctggctgatcaccccggcgaacttgtgcggacagacagccctaatttcctgtgcagcgtgctgcctacacactggcggtgcaacaagacactgcctatcgccttcaaggtggtggctctgggagatgtgcctgatggcacactggtcacagtgatggccggcaacgacgagaattacagcgccgagctgagaaatgccaccgccgccatgaagaaccaggtggccagattcaacgacctgagattcgtgggcagaagcggcaggggcaagagctttaccctgaccatcaccgtgttcaccaatcctccacaggtggcaacctaccaccgggccatcaagatcaccgtggatggccctagagagcccagacggcacagacagaaactggacgaccagaccaagcctggcagcctgagctttagcgagagactgagcgagctggaacagctgagaagaaccgccatgcgggtgtccccacatcaccctgctcctacacctaatcctcgggccagcctgaatcacagcaccgcctttaatccccagcctcagagccagatgcaagaagtgggcttctgtcacgtggcccaagtgggactgaagctgctgggataaggactagtccctgttcccagagcccacttttttttctttttttgaaataaaatagcctgtctttcagatctcaaaggctcttttcagagccaccaaaaaaaaaaaaaaaaaaaaaaaaaaaaaaaaaaaaaaaaaaaaaaaaaaaaaaaaaaaaaaaaaaaaaaaaaaaaaaaaaaaaaaaaaaaaaaaaaaaaagaatt

SEQ ID NO: 1206 - RNA, 2755 nt, synthetic construct
  misc_feature 1..2755: note = Artificial____RUNX1(1-241)_V_RUNX1T1b(22-604) mRNA opt3
  source 1..2755: mol_type = other RNA
aggagagtcccgcagtcggcgtccagcggctctgcttgttcgtgtgtgtgtcgttgcaggccttattcaagcttaccatgagaatccccgtggatgccagcaccagcagaagattcacccctcctagcaccgctctgagccctggcaagatgtctgaagctctgcctctgggagcacctgatgctggtgcagctctggccggaaaactgagaagcggcgacagatccatggtggaagtgctggctgatcaccccggcgaacttgtgcggacagacagccctaatttcctgtgcagcgtgctgcctacacactggcggtgcaacaagacactgcctatcgccttcaaggtggtggctctgggagatgtgcctgatggcacactggtcacagtgatggccggcaacgacgagaattacagcgccgagctgagaaatgccaccgccgccatgaagaaccaggtggccagattcaacgacctgagattcgtgggcagaagcggcaggggcaagagctttaccctgaccatcaccgtgttcaccaatcctccacaggtggcaacctaccaccgggccatcaagatcaccgtggatggccctagagagcccagacggcacagacagaaactggacgaccagaccaagcctggcagcctgagctttagcgagagactgagcgagctggaacagctgagaagaaccgccatgcgggtgtccccacatcaccctgctcctacacctaatcctcgggccagcctgaatcacagcaccgcctttaatccccagcctcagagccagatgcaagtgggccctgagaaaagggtgccagccatgcctggaagccccgtggaagtgaagatccagagcagatctagccctcctaccatgcctcctctgcctccaatcaatcctggcggccctagacctgtgtccttcacacctaccgctctgtccaacggcatcaatcacagccctccaacactgaatggcgccccatctccacctcagcggttttctaatggccctgccagcagcacaagcagcgccctgacaaatcagcagctgcctgctacatgtggcgccagacagctgagcaagctgaagcggtttctgaccacactgcagcagttcggcaacgatatcagccccgagatcggcgagaaagtgcggacactggttctggccctggtcaacagcaccgtgaccatcgaagagttccactgcaagctgcaagaggccaccaactttccgctgcggcctttcgtgatcccattcctgaaggccaacctgcctctgctgcagagagagctgctgcattgcgccagagccgccaagcagacaccttctcagtatctggcccagcacgagcatctgctgctgaacacctctatcgcctctccagccgatagcagcgagctgctcatggaagtgcacggcaacggaaagaggccctctccagagcggagagaggaaaacagcttcgaccgggacacaatcgcccctgagcctccagccaagagagtgtgcacaatcagcccagctcctagacacagccccgctctgacagtgccccttatgaaccctggcggacagtttcaccccacacctccaccactccagcactacaccctggaagatatcgccaccagccacctgtaccgcgagcctaacaagatgctggaacaccgggaagtgcgcgacaggcaccattctctgggactgaacggcggctaccaggacgaactggtggatcacagactgaccgagcgcgagtgggccgatgaatggaaacacctggatcacgccctgaactgcatcatggaaatggtggaaaagacccggcggagcatggccgtcctgagaagatgtcaagagagcgacagagaggaactgaactactggaagcggaggtacaacgagaacaccgagctgcggaaaaccggcactgagctggtgtccagacagcactctcctggctctgccgatagcctgagcaacgactcccagagagagttcaacagcagacccggcacaggctacgtgcccgtggaattttggaagaaaaccgaagaggccgtgaacaaagtcaagattcaggccatgagcgaggtgcagaaagccgtggctgaggccgaacagaaagccttcgaagtgatcgccaccgagcgggccagaatggaacagacaatcgccgacgtgaagagacaggccgccgaggatgccttcctggtcatcaacgagcaagaggaaagcaccgagaactgctggaactgcggcagaaaggccagcgagacatgcagcggctgcaatatcgccagatattgcggcagcttctgccagcacaaggactgggagagacaccacagactgtgcggccagaatctgcacggacagagccctcatggacagggcagacctctgctccctgttggcagaggatctagcgccagatctgccgactgtagcgtgccatctcctgcactggataagaccagcgccaccacaagcagaagcagcacaccagcctctgtgaccgccatcgataccaacggactgtgaggactagtccctgttcccagagcccacttttttttctttttttgaaataaaatagcctgtctttcagatctcaaaggctcttttcagagccaccaaaaaaaaaaaaaaaaaaaaaaaaaaaaaaaaaaaaaaaaaaaaaaaaaaaaaaaaaaaaaaaaaaaaaaaaaaaaaaaaaaaaaaaaaaaaaaaaaaaaagaatt

SEQ ID NO: 1207 - RNA, 2755 nt, synthetic construct
  misc_feature 1..2755: note = Artificial____RUNX1(1-241)_I_RUNX1T1b(22-604) mRNA opt3
  source 1..2755: mol_type = other RNA
aggagagtcccgcagtcggcgtccagcggctctgcttgttcgtgtgtgtgtcgttgcaggccttattcaagcttaccatgagaatccccgtggatgccagcaccagcagaagattcacccctcctagcaccgctctgagccctggcaagatgtctgaagctctgcctctgggagcacctgatgctggtgcagctctggccggaaaactgagaagcggcgacagatccatggtggaagtgctggctgatcaccccggcgaacttgtgcggacagacagccctaatttcctgtgcagcgtgctgcctacacactggcggtgcaacaagacactgcctatcgccttcaaggtggtggctctgggagatgtgcctgatggcacactggtcacagtgatggccggcaacgacgagaattacagcgccgagctgagaaatgccaccgccgccatgaagaaccaggtggccagattcaacgacctgagattcgtgggcagaagcggcaggggcaagagctttaccctgaccatcaccgtgttcaccaatcctccacaggtggcaacctaccaccgggccatcaagatcaccgtggatggccctagagagcccagacggcacagacagaaactggacgaccagaccaagcctggcagcctgagctttagcgagagactgagcgagctggaacagctgagaagaaccgccatgcgggtgtccccacatcaccctgctcctacacctaatcctcgggccagcctgaatcacagcaccgcctttaatccccagcctcagagccagatgcagatcggccctgagaaaagggtgccagccatgcctggaagccccgtggaagtgaagatccagagcagatctagccctcctaccatgcctcctctgcctccaatcaatcctggcggccctagacctgtgtccttcacacctaccgctctgtccaacggcatcaatcacagccctccaacactgaatggcgccccatctccacctcagcggttttctaatggccctgccagcagcacaagcagcgccctgacaaatcagcagctgcctgctacatgtggcgccagacagctgagcaagctgaagcggtttctgaccacactgcagcagttcggcaacgatatcagccccgagatcggcgagaaagtgcggacactggttctggccctggtcaacagcaccgtgaccatcgaagagttccactgcaagctgcaagaggccaccaactttccgctgcggcctttcgtgatcccattcctgaaggccaacctgcctctgctgcagagagagctgctgcattgcgccagagccgccaagcagacaccttctcagtatctggcccagcacgagcatctgctgctgaacacctctatcgcctctccagccgatagcagcgagctgctcatggaagtgcacggcaacggaaagaggccctctccagagcggagagaggaaaacagcttcgaccgggacacaatcgcccctgagcctccagccaagagagtgtgcacaatcagcccagctcctagacacagccccgctctgacagtgccccttatgaaccctggcggacagtttcaccccacacctccaccactccagcactacaccctggaagatatcgccaccagccacctgtaccgcgagcctaacaagatgctggaacaccgggaagtgcgcgacaggcaccattctctgggactgaacggcggctaccaggacgaactggtggatcacagactgaccgagcgcgagtgggccgatgaatggaaacacctggatcacgccctgaactgcatcatggaaatggtggaaaagacccggcggagcatggccgtcctgagaagatgtcaagagagcgacagagaggaactgaactactggaagcggaggtacaacgagaacaccgagctgcggaaaaccggcactgagctggtgtccagacagcactctcctggctctgccgatagcctgagcaacgactcccagagagagttcaacagcagacccggcacaggctacgtgcccgtggaattttggaagaaaaccgaagaggccgtgaacaaagtcaagattcaggccatgagcgaggtgcagaaagccgtggctgaggccgaacagaaagccttcgaagtgatcgccaccgagcgggccagaatggaacagacaatcgccgacgtgaagagacaggccgccgaggatgccttcctggtcatcaacgagcaagaggaaagcaccgagaactgctggaactgcggcagaaaggccagcgagacatgcagcggctgcaatatcgccagatattgcggcagcttctgccagcacaaggactgggagagacaccacagactgtgcggccagaatctgcacggacagagccctcatggacagggcagacctctgctccctgttggcagaggatctagcgccagatctgccgactgtagcgtgccatctcctgcactggataagaccagcgccaccacaagcagaagcagcacaccagcctctgtgaccgccatcgataccaacggactgtgaggactagtccctgttcccagagcccacttttttttctttttttgaaataaaatagcctgtctttcagatctcaaaggctcttttcagagccaccaaaaaaaaaaaaaaaaaaaaaaaaaaaaaaaaaaaaaaaaaaaaaaaaaaaaaaaaaaaaaaaaaaaaaaaaaaaaaaaaaaaaaaaaaaaaaaaaaaaaagaatt

SEQ ID NO: 1208 - RNA, 1639 nt, synthetic construct
  misc_feature 1..1639: note = Homo sapiens__Q01196-1__RUNX1(K83E_R174Q) mRNA opt3
  source 1..1639: mol_type = other RNA
aggagagtcccgcagtcggcgtccagcggctctgcttgttcgtgtgtgtgtcgttgcaggccttattcaagcttaccatgagaatccccgtggacgccagcacctccaggcggttcacacctccatctactgctctgtcaccgggcaagatgagtgaggcactcccccttggggcccctgatgcgggagctgccctggcaggtaaattgcgcagcggcgaccgatccatggtcgaagttttagccgatcacccaggggagctggtgcgtacggactctcccaactttctatgctcggtactccctacccattggagatgtaatgaaacactgccaattgctttcaaggtggtcgcacttggagatgtgcccgacggcactctggttaccgtgatggccggtaacgatgagaattactcagctgaattgaggaacgccacagcggcaatgaaaaatcaggtcgcccggtttaacgacctccgcttcgtggggagaagcggaaggggcaagagttttaccctgactataacagtattcaccaatcctccacaagttgctacgtatcaccgggccatcaaaattactgtggatggcccgcaggagccccgccgacatagacagaagctggacgatcagaccaagcctgggtccctctcttttagcgagaggttatccgaactggagcaacttcggcgtacagcaatgcgcgtctcaccacaccatcccgctcctactccaaaccccagagccagtttgaatcacagcaccgcgttcaacccgcagcctcagtctcagatgcaagacacaaggcagatccagccctccccaccttggtcatacgatcagagctatcaatacctgggaagtattgcctctccctccgtgcacccagcaacccccatcagccctggtcgggcttcgggcatgacgactctatctgccgaactctcctcacgactgagtacagctccagaccttaccgcctttagcgacccgcgccagttccccgcactgccttccatatctgatccaagaatgcattatcccggggcctttacttacagccctacaccagtgacctcaggaatcggcattggtatgagtgctatggggtccgcgacgaggtatcacacctacttgcccccgccttacccaggaagctctcaggcacaaggcggccccttccaggcctcaagtcctagctatcatctctactatggggcttccgccggatcttaccagttttcgatggtcggtggcgagcggagcccaccccgcatcctgcctccctgcacaaatgcatccactgggtcagccttactgaacccaagtctcccgaatcagtctgacgttgtggaggctgaaggaagccactccaactcacctaccaatatggcccccagcgcaagacttgaggaagcggtatggaggccatattgaggactagtccctgttcccagagcccacttttttttctttttttgaaataaaatagcctgtctttcagatctcaaaggctcttttcagagccaccaaaaaaaaaaaaaaaaaaaaaaaaaaaaaaaaaaaaaaaaaaaaaaaaaaaaaaaaaaaaaaaaaaaaaaaaaaaaaaaaaaaaaaaaaaaaaaaaaaaaagaatt

SEQ ID NO: 1209 - RNA, 2113 nt, synthetic construct
  misc_feature 1..2113: note = Homo sapiens____CBFbeta(1-165)_SMMHC(1527-1972) mRNA opt3
  source 1..2113: mol_type = other RNA
aggagagtcccgcagtcggcgtccagcggctctgcttgttcgtgtgtgtgtcgttgcaggccttattcaagcttaccatgcccagagtggtccctgaccagaggagcaagttcgagaacgaagagtttttccggaaactgtcccgcgaatgcgagatcaagtacaccggctttcgagatcgtccacacgaagagagacaagccaggttccagaatgcttgtcgggacgggcgctctgagattgcatttgttgccacaggaactaacctctcacttcagttctttccggcgagttggcagggtgaacaaagacagacgcccagcagggagtatgtggatctggaacgggaggctggcaaagtatacttgaaggcccctatgatattaaatggggtgtgcgtcatctggaaaggatggattgacctgcagcgcctagatggcatgggttgtctcgagttcgacgaggaacgagcacagcaagaagatgccctggctcagcaggcatttgaggaagccagaaggcggacccgtgagttcgaggaccgcgatagatcccatagggaagagatggaagtgcacgagcttgaaaagtctaagcgggctctggagacacagatggaggaaatgaaaactcaattggaggaactcgaggacgaactgcaggccaccgaggatgcgaagctgcgactcgaggttaacatgcaggcattaaaagggcaatttgaacgcgacctgcaggccagagatgagcagaatgaagagaagaggcggcagcttcaacgccagttgcatgagtatgaaacagagctggaagacgagagaaaacagagggctctagccgcagctgccaagaagaaactcgaaggagacctgaaggatcttgagctgcaggcggactcggccatcaaaggccgtgaggaagcaattaagcaattgcggaaactccaggctcagatgaaggatttccagcgagagctggaagacgccagagcttcaagggatgagatctttgccaccgcaaaagaaaacgagaagaaggccaagagcttagaggctgacctgatgcaactccaggaagatcttgcggcagccgagcgcgctcggaagcaggccgacctggaaaaagaggaattggcagaggagctagccagttccctgtctggcagaaatgctctccaggatgaaaagaggcgcctggaggcccgaatagcacaacttgaagaggagctggaagaggaacaggggaacatggaggcgatgagcgaccgggtgcgtaaagctactcagcaagccgaacagttgtccaatgagctcgcaacagagagatcaaccgcccagaagaacgaaagtgctaggcagcaactggagcgccagaataaggaattacggagcaaactgcacgagatggaaggagccgtcaagtctaaattcaagtccacgatcgcagctctagaggccaaaattgcgcagctcgaggaacaggtggagcaagaagccagagagaagcaggctgcaactaagtcactgaaacagaaggataaaaagttgaaagaaatccttctgcaggtagaggacgagaggaagatggccgaacaatacaaggagcaggctgaaaaaggtaacgcccgagttaagcagctcaaacgccaactggaggaggcagaagaggaaagccagcggattaatgcgaacagaaggaaacttcagcgtgagctggacgaagccaccgagagtaatgaggctatgggccgcgaagtgaacgccttgaaatctaagctccggagagggaacgagacatccttcgtcccaagcaggcgatcgggaggccggcgcgtgatcgaaaatgcagatggttctgaggaagagactgacaccagagatgctgactttaacgggacaaaagcctccgagtgaggactagtccctgttcccagagcccacttttttttctttttttgaaataaaatagcctgtctttcagatctcaaaggctcttttcagagccaccaaaaaaaaaaaaaaaaaaaaaaaaaaaaaaaaaaaaaaaaaaaaaaaaaaaaaaaaaaaaaaaaaaaaaaaaaaaaaaaaaaaaaaaaaaaaaaaaaaaaagaatt

SEQ ID NO: 1210 - RNA, 1828 nt, synthetic construct
  misc_feature 1..1828: note = Artificial____CBFbeta(1-165)_SMMHC(1527-1877) mRNA opt3
  source 1..1828: mol_type = other RNA
aggagagtcccgcagtcggcgtccagcggctctgcttgttcgtgtgtgtgtcgttgcaggccttattcaagcttaccatgcccagagtggtccctgaccagaggagcaagttcgagaacgaagagtttttccggaaactgtcccgcgaatgcgagatcaagtacaccggctttcgagatcgtccacacgaagagagacaagccaggttccagaatgcttgtcgggacgggcgctctgagattgcatttgttgccacaggaactaacctctcacttcagttctttccggcgagttggcagggtgaacaaagacagacgcccagcagggagtatgtggatctggaacgggaggctggcaaagtatacttgaaggcccctatgatattaaatggggtgtgcgtcatctggaaaggatggattgacctgcagcgcctagatggcatgggttgtctcgagttcgacgaggaacgagcacagcaagaagatgccctggctcagcaggcatttgaggaagccagaaggcggacccgtgagttcgaggaccgcgatagatcccatagggaagagatggaagtgcacgagcttgaaaagtctaagcgggctctggagacacagatggaggaaatgaaaactcaattggaggaactcgaggacgaactgcaggccaccgaggatgcgaagctgcgactcgaggttaacatgcaggcattaaaagggcaatttgaacgcgacctgcaggccagagatgagcagaatgaagagaagaggcggcagcttcaacgccagttgcatgagtatgaaacagagctggaagacgagagaaaacagagggctctagccgcagctgccaagaagaaactcgaaggagacctgaaggatcttgagctgcaggcggactcggccatcaaaggccgtgaggaagcaattaagcaattgcggaaactccaggctcagatgaaggatttccagcgagagctggaagacgccagagcttcaagggatgagatctttgccaccgcaaaagaaaacgagaagaaggccaaaagccttgaggctgacctgatgcaactccaggaagatcttgcggcagccgagcgcgctcggaagcaggccgacctggaaaaagaggaattggcagaggagctagccagttccctgtctggcagaaatgctctccaggatgaaaagaggcgcctggaggcccgaatagcacaacttgaagaggagctggaagaggaacaggggaacatggaggcgatgagcgaccgggtgcgtaaagctactcagcaagccgaacagttgtccaatgagctcgcaacagagagatcaaccgcccagaagaacgaaagtgctaggcagcaactggagcgccagaataaggaattacggagcaaactgcacgagatggaaggagccgtcaagtctaaattcaagtccacgatcgcagctctagaggccaaaattgcgcagctcgaggaacaggtggagcaagaagccagagagaagcaggctgcaactaagtcactgaaacagaaggataaaaagttaaaagaaatcttgctgcaggtagaggacgagaggaagatggccgaacaatacaaggagcaggctgaaaaaggtaacgcctgaggactagtccctgttcccagagcccacttttttttctttttttgaaataaaatagcctgtctttcagatctcaaaggctcttttcagagccaccaaaaaaaaaaaaaaaaaaaaaaaaaaaaaaaaaaaaaaaaaaaaaaaaaaaaaaaaaaaaaaaaaaaaaaaaaaaaaaaaaaaaaaaaaaaaaaaaaaaaagaatt

SEQ ID NO: 1211 - RNA, 889 nt, synthetic construct
  misc_feature 1..889: note = Artificial____CBFbeta(1-165)_Linker_Lifeact mRNA opt3
  source 1..889: mol_type = other RNA
aggagagtcccgcagtcggcgtccagcggctctgcttgttcgtgtgtgtgtcgttgcaggccttattcaagcttaccatgcccagagtggtccctgaccagaggagcaagttcgagaacgaagagtttttccggaaactgtcccgcgaatgcgagatcaagtacaccggctttcgagatcgtccacacgaagagagacaagccaggttccagaatgcttgtcgggacgggcgctctgagattgcatttgttgccacaggaactaacctctcacttcagttctttccggcgagttggcagggtgaacaaagacagacgcccagcagggagtatgtggatctggaacgggaggctggcaaagtatacttgaaggcccctatgatattaaatggggtgtgcgtcatctggaaaggatggattgacctgcagcgcctagatggcatgggttgtctcgagttcgacgaggaacgagcacagcaagaagatgccctggctcagcaggcatttgaggaagccagaaggcggacccgtgagttcgaggaccgcgatagatcccatagggaagagatggaagggggatctggcggctcagggggatcgggtggcagcgggggaggcggtgtggctgaccttatcaagaagtttgagagtatttccaaagaagagggggatccacccgttgccacatgaggactagtccctgttcccagagcccacttttttttctttttttgaaataaaatagcctgtctttcagatctcaaaggctcttttcagagccaccaaaaaaaaaaaaaaaaaaaaaaaaaaaaaaaaaaaaaaaaaaaaaaaaaaaaaaaaaaaaaaaaaaaaaaaaaaaaaaaaaaaaaaaaaaaaaaaaaaaaagaatt

SEQ ID NO: 1212 - RNA, 856 nt, synthetic construct
  misc_feature 1..856: note = Artificial____CBFbeta(1-165)_HIF1alpha(549-575) mRNA opt3
  source 1..856: mol_type = other RNA
aggagagtcccgcagtcggcgtccagcggctctgcttgttcgtgtgtgtgtcgttgcaggccttattcaagcttaccatgcccagagtggtccctgaccagaggagcaagttcgagaacgaagagtttttccggaaactgtcccgcgaatgcgagatcaagtacaccggctttcgagatcgtccacacgaagagagacaagccaggttccagaatgcttgtcgggacgggcgctctgagattgcatttgttgccacaggaactaacctctcacttcagttctttccggcgagttggcagggtgaacaaagacagacgcccagcagggagtatgtggatctggaacgggaggctggcaaagtatacttgaaggcccctatgatattaaatggggtgtgcgtcatctggaaaggatggattgacctgcagcgcctagatggcatgggttgtctcgagttcgacgaggaacgagcacagcaagaagatgccctggctcagcaggcatttgaggaagccagaaggcggacccgtgagttcgaggaccgcgatagatcccatagggaagagatggaaccattttctacacaggacactgatcttgacctggagatgttggctccctatatccctatggatgacgacttccaactccggtgaggactagtccctgttcccagagcccacttttttttctttttttgaaataaaatagcctgtctttcagatctcaaaggctcttttcagagccaccaaaaaaaaaaaaaaaaaaaaaaaaaaaaaaaaaaaaaaaaaaaaaaaaaaaaaaaaaaaaaaaaaaaaaaaaaaaaaaaaaaaaaaaaaaaaaaaaaaaaagaatt

SEQ ID NO: 1213 - RNA, 901 nt, synthetic construct
  misc_feature 1..901: note Artificial____CBFbeta(1-165)_Linker_HIF1alpha(549-575) mRNA opt3
  source 1..901: mol_type = other RNA
aggagagtcccgcagtcggcgtccagcggctctgcttgttcgtgtgtgtgtcgttgcaggccttattcaagcttaccatgcccagagtggtccctgaccagaggagcaagttcgagaacgaagagtttttccggaaactgtcccgcgaatgcgagatcaagtacaccggctttcgagatcgtccacacgaagagagacaagccaggttccagaatgcttgtcgggacgggcgctctgagattgcatttgttgccacaggaactaacctctcacttcagttctttccggcgagttggcagggtgaacaaagacagacgcccagcagggagtatgtggatctggaacgggaggctggcaaagtatacttgaaggcccctatgatattaaatggggtgtgcgtcatctggaaaggatggattgacctgcagcgcctagatggcatgggttgtctcgagttcgacgaggaacgagcacagcaagaagatgccctggctcagcaggcatttgaggaagccagaaggcggacccgtgagttcgaggaccgcgatagatcccatagggaagagatggaagggggatctggcggctcagggggatcgggtggcagcgggggaggcccatttagtacacaggacactgatcttgacctggagatgttggctccctatatccctatggatgacgacttccaactccggtgaggactagtccctgttcccagagcccacttttttttctttttttgaaataaaatagcctgtctttcagatctcaaaggctcttttcagagccaccaaaaaaaaaaaaaaaaaaaaaaaaaaaaaaaaaaaaaaaaaaaaaaaaaaaaaaaaaaaaaaaaaaaaaaaaaaaaaaaaaaaaaaaaaaaaaaaaaaaaagaatt

SEQ ID NO: 1214 - RNA, 2536 nt, synthetic construct
  misc_feature 1..2536: note = Artificial____RUNX1(1-177)_N_RUNX1T1a(31-604) mRNA opt3
  source 1..2536: mol_type = other RNA
aggagagtcccgcagtcggcgtccagcggctctgcttgttcgtgtgtgtgtcgttgcaggccttattcaagcttaccatgagaatccccgtggacgccagcacctccaggcggttcacacctccatctactgctctgtcaccgggcaagatgagtgaggcactcccccttggggcccctgatgcgggagctgccctggcaggtaaattgcgcagcggcgaccgatccatggtcgaagttttagccgatcacccaggggagctggtgcgtacggactctcccaactttctatgctcggtactccctacccattggagatgtaataagacactgccaattgctttcaaagtggtcgcacttggagatgtgcccgacggcactctggttaccgtgatggccggtaacgatgaaaattactcagctgagttgaggaacgccacagcggcaatgaagaatcaggtcgcccggtttaacgacctccgcttcgtggggagaagcggaaggggcaaaagttttaccctgactataacagtattcaccaatcctccacaagttgctacgtatcaccgggccatcaagattactgtggatggcccgcgcgaaccccgaaacagaaccgagaagcattccacaatgcctgactctccagtcgatgtgaaaactcagagcaggctgacaccccctaccatgccacccccgcctaccacgcagggggcaccccggacttcctcatttacaccaaccactctcacaaatggaaccagtcacagccctacggctttaaacggtgccccctctccacccaatggcttctccaacgggccttcaagcagttcttccagctcgctggcgaatcagcaacttccaccggcctgcggagcacgtcagttgtctaagctgaaacgctttctaaccacactccagcagttcggcaacgacatctcccccgagattggtgaaagagtgaggactctggtccttgggctggttaattcaaccttgacaatcgaggaatttcatagtaagctccaagaggctactaacttccctctgcggccatttgtgatacccttcttaaaagccaacctgcctctccttcagcgagagctgttgcactgtgctcgcctagccaagcagaatccagcacagtacctggcccaacacgaacagctcctgcttgatgctagcaccacatcccccgtagactctagcgagctgttgctcgacgtgaacgaaaatggaaagagaaggaccccggatcggactaaagagaacggcttcgaccgcgaacctctgcattcagagcacccaagtaagagaccctgcacgatctcccctggccagaggtatagccccaataacgggttatcttaccaaccaaatggactgcctcatcccacaccaccgcctccccagcactatcgtctagatgacatggcgattgcacaccattaccgggattcatatcgacacccaagtcatagagacctcagggatcgcaaccggcccatgggtctgcacggcaccagacaggaggaaatgatcgaccataggcttactgatcgcgagtgggccgaagagtggaaacacttggaccatctgctcaattgtattatggatatggtcgaaaagacccgacggagcctgacagtgcttcgtagatgccaggaggctgacagggaggaactgaactactggatccgccggtactccgacgccgaggatttgaaaaagggcggagggtcttcgagctcccactcaagacaacagagtcctgttaatccagaccccgtggcactcgatgcccacagggaatttctgcatcgacctgcttctggttatgtcccggaggaaatatggaaaaaggccgaggaggcagtgaacgaagtaaagcgccaggcgatgaccgagttacagaaagctgttagcgaagccgagcggaaggcacacgacatgattactacagagagagccaaaatggaaaggacggtggctgaggccaagcgtcaagcagctgaagatgccctggcggtcatcaatcagcaggaggactcctcagaaagctgttggaactgcgggcgcaaagcctctgagacctgttccggctgcaatactgctcggtactgtggaagtttctgccagcacaaggattgggagaagcatcaccatatttgcggccaaacactacaggcacagcagcaaggggacaccccagccgtgtctagctccgtcacacccaactcaggagctggtagtcctatggatactccacccgccgcaacccctagaagcacgaccccgggcacaccctcgactatcgaaaccacaccaaggtgaggactagtccctgttcccagagcccacttttttttctttttttgaaataaaatagcctgtctttcagatctcaaaggctcttttcagagccaccaaaaaaaaaaaaaaaaaaaaaaaaaaaaaaaaaaaaaaaaaaaaaaaaaaaaaaaaaaaaaaaaaaaaaaaaaaaaaaaaaaaaaaaaaaaaaaaaaaaaagaatt

SEQ ID NO: 1215 - RNA, 1051 nt, synthetic construct
  misc_feature 1..1051: note = Artificial____RUNX1(1-241)_RUNX1T1b(short) mRNA opt3
  source 1..1051: mol_type = other RNA
aggagagtcccgcagtcggcgtccagcggctctgcttgttcgtgtgtgtgtcgttgcaggccttattcaagcttaccatgagaatccccgtggacgccagcacctccaggcggttcacacctccatctactgctctgtcaccgggcaagatgagtgaggcactcccccttggggcccctgatgcgggagctgccctggcaggtaaattgcgcagcggcgaccgatccatggtcgaagttttagccgatcacccaggggagctggtgcgtacggactctcccaactttctatgctcggtactccctacccattggagatgtaataagacactgccaattgctttcaaagtggtcgcacttggagatgtgcccgacggcactctggttaccgtgatggccggtaacgatgaaaattactcagctgagttgaggaacgccacagcggcaatgaagaatcaggtcgcccggtttaacgacctccgcttcgtggggagaagcggaaggggcaaaagttttaccctgactataacagtattcaccaatcctccacaagttgctacgtatcaccgggccatcaagattactgtggatggcccgcgcgaaccccgaagacataggcagaagctggacgatcagaccaaacctgggtccctctcttttagcgagcggttatccgagctggaacagcttcgtcgcacagcaatgagagtctcaccacaccatcccgctcctactccaaaccccagggccagtttgaatcacagcaccgcgttcaacccgcaacctcagtctcagatgcaggaggtgggattttgccacgtggcccaagtcggtctgaagctactcggctgaggactagtccctgttcccagagcccacttttttttctttttttgaaataaaatagcctgtctttcagatctcaaaggctcttttcagagccaccaaaaaaaaaaaaaaaaaaaaaaaaaaaaaaaaaaaaaaaaaaaaaaaaaaaaaaaaaaaaaaaaaaaaaaaaaaaaaaaaaaaaaaaaaaaaaaaaaaaaagaatt

SEQ ID NO: 1216 - RNA, 2755 nt, synthetic construct
  misc_feature 1..2755: note = Artificial____RUNX1(1-241)_V_RUNX1T1b(22-604) mRNA opt3
  source 1..2755: mol_type = other RNA
aggagagtcccgcagtcggcgtccagcggctctgcttgttcgtgtgtgtgtcgttgcaggccttattcaagcttaccatgagaatccccgtggacgccagcacctccaggcggttcacacctccatctactgctctgtcaccgggcaagatgagtgaggcactcccccttggggcccctgatgcgggagctgccctggcaggtaaattgcgcagcggcgaccgatccatggtcgaagttttagccgatcacccaggggagctggtgcgtacggactctcccaactttctatgctcggtactccctacccattggagatgtaataagacactgccaattgctttcaaagtggtcgcacttggagatgtgcccgacggcactctggttaccgtgatggccggtaacgatgaaaattactcagctgagttgaggaacgccacagcggcaatgaagaatcaggtcgcccggtttaacgacctccgcttcgtggggagaagcggaaggggcaaaagttttaccctgactataacagtattcaccaatcctccacaagttgctacgtatcaccgggccatcaagattactgtggatggcccgcgcgaaccccgaagacataggcagaagctggacgatcagaccaaacctgggtccctctcttttagcgagcggttatccgagctggaacagcttcgtcgcacagcaatgagagtctcaccacaccatcccgctcctactccaaaccccagggccagtttgaatcacagcaccgcgttcaacccgcaacctcagtctcagatgcaagtgggacccgagaagcgggtgccagccatgcctggttcccccgtcgaagttaaaatccagtcacgaagcagtccacccacaatgcctccactgccgcccattaatcctggcgggccacgccccgtgtcttttacccctacggcactatccaacggaatcaatcacagcccacccactctcaacggcgctccgtcgcctccacagagattctctaatggtcccgcctcctcaacaagtagcgctctgaccaaccagcagcttcctgccacttgcggggcaaggcaactgtccaagttgaaacggtttctcacaaccctgcagcagttcggaaacgacatatctcccgagatcggcgagaaggtacgcacgttagtgctggccctcgtcaatagcaccgtgacaattgaagagtttcattgtaagctacaagaagctactaacttcccactgagacctttcgttatcccctttttgaaagcgaatctaccactgctccagagggagctgcttcactgcgcacgtgccgctaagcagaccccgtcacagtacctggcccaacatgaacacttgctcctgaacacaagtattgcatcccctgccgatagctctgagttactgatggaggtgcacggcaatgggaaacggccctcaccagaacgaagagaggaaaacagtttcgacagggacactatcgctcccgagcctccagccaagcgcgtctgtaccataagccccgcacctcggcattccccggcgctaacagtgccactcatgaatcccggaggtcagtttcaccctaccccaccccctctgcagcattatactcttgaagatattgctacgtctcacttgtacagagagccgaacaaaatgctggagcatagggaagtacgcgaccgacaccactcgctcggcctgaatgggggatatcaggatgagcttgttgaccatcggctgacagaacgtgagtgggccgatgaatggaagcacttggaccatgcactcaactgcatcatggagatggtggagaaaaccagaaggagcatggccgtcctgcgccggtgtcaagaatccgatagagaggaattaaattactggaagaggcgatataacgagaatactgagctgcgcaagaccggcacagaacttgtgtcacggcagcacagtcccggttctgctgacagcctctccaacgattcacagagagagttcaatagcaggccagggaccggctacgtccctgtggaattttggaaaaagactgaggaagccgttaacaaagtgaagattcaggcaatgtctgaggtacaaaaagctgtcgccgaggcggaacagaaggccttcgaggtgatcgctacagaacgtgcacgcatggagcagacgatcgccgacgttaagcggcaggctgccgaagatgcatttctggtgattaacgagcaagaggaatccaccgagaattgctggaactgtggaagaaaagcgagtgaaacttgcagcggctgtaatatagccaggtactgcgggtctttctgccagcacaaggactgggagcgacatcaccggctttgtggacagaacttgcatggtcaatcaccccacggccaggggcgcccactgctccctgtcggaagaggctccagtgctaggagcgccgactgctcggtgccctccccagcactggataaaacatctgctaccacaagccggtcaagtactccggcctccgtaaccgcaatcgacacgaatggtttatgaggactagtccctgttcccagagcccacttttttttctttttttgaaataaaatagcctgtctttcagatctcaaaggctcttttcagagccaccaaaaaaaaaaaaaaaaaaaaaaaaaaaaaaaaaaaaaaaaaaaaaaaaaaaaaaaaaaaaaaaaaaaaaaaaaaaaaaaaaaaaaaaaaaaaaaaaaaaaagaatt

SEQ ID NO: 1217 - RNA, 2755 nt, synthetic construct
  misc_feature 1..2755: note = Artificial____RUNX1(1-241)_I_RUNX1T1b(22-604) mRNA opt3
  source 1..2755: mol_type = other RNA
aggagagtcccgcagtcggcgtccagcggctctgcttgttcgtgtgtgtgtcgttgcaggccttattcaagcttaccatgagaatccccgtggacgccagcacctccaggcggttcacacctccatctactgctctgtcaccgggcaagatgagtgaggcactcccccttggggcccctgatgcgggagctgccctggcaggtaaattgcgcagcggcgaccgatccatggtcgaagttttagccgatcacccaggggagctggtgcgtacggactctcccaactttctatgctcggtactccctacccattggagatgtaataagacactgccaattgctttcaaagtggtcgcacttggagatgtgcccgacggcactctggttaccgtgatggccggtaacgatgaaaattactcagctgagttgaggaacgccacagcggcaatgaagaatcaggtcgcccggtttaacgacctccgcttcgtggggagaagcggaaggggcaaaagttttaccctgactataacagtattcaccaatcctccacaagttgctacgtatcaccgggccatcaagattactgtggatggcccgcgcgaaccccgaagacataggcagaagctggacgatcagaccaaacctgggtccctctcttttagcgagcggttatccgagctggaacagcttcgtcgcacagcaatgagagtctcaccacaccatcccgctcctactccaaaccccagggccagtttgaatcacagcaccgcgttcaacccgcaacctcagtctcagatgcagatcggacccgagaagcgggtgccagccatgcctggttcccccgtggaagtcaaaattcaatcacgaagcagtccacccacaatgcctccactgccgcccatcaatcctggcgggccacgccccgtttcttttacccctacggcactatccaacggaataaatcacagcccacccactctcaacggcgctccgtcgcctccacagagattctctaatggtcccgcctcctcaacaagtagcgctctgaccaaccagcagcttcctgccacttgcggggcaaggcaactgtccaagttgaaacggtttctcacaaccctgcagcagttcggaaacgacatctctcccgagattggcgagaaggtgcgcacgttagtactggccctcgtgaatagcaccgtcacaatcgaagagtttcattgtaagctacaagaagctactaacttcccactgagacctttcgtgattccctttttgaaagcgaatctaccactgctccagagggagctgcttcactgcgcacgtgccgctaagcagaccccgtcacagtacctggcccaacatgaacacttgctcctgaacacaagtatcgcatcccctgccgatagctctgagttactgatggaggttcacggcaatgggaaacggccctcaccagaacgaagagaggaaaacagtttcgacagggacactatagctcccgagcctccagccaagcgcgtgtgtaccattagccccgcacctcggcattccccggcgctaacagtcccactcatgaatcccggaggtcagtttcaccctaccccaccccctctgcagcattatactcttgaagatatcgctacgtctcacttgtacagagagccgaacaaaatgctggagcatagggaagtgcgcgaccgacaccactcgctcggcctgaatgggggatatcaggatgagcttgtagaccatcggctgacagaacgtgagtgggccgatgaatggaagcacttggaccatgcactcaactgcattatggagatggttgagaaaaccagaaggagcatggccgtgctgcgccggtgtcaagaatccgatagagaggaattaaattactggaagaggcgatataacgagaatactgagctgcgcaagaccggcacagaacttgtctcacggcagcacagtcccggttctgctgacagcctctccaacgattcacagagagagttcaatagcaggccagggaccggctacgtgcctgtcgaattttggaaaaagactgaggaagccgtgaacaaagttaagatccaggcaatgtctgaggtgcaaaaagctgtagccgaggcggaacagaaggccttcgaggtcatcgctacagaacgtgcacgcatggagcagacgattgccgacgtgaagcggcaggctgccgaagatgcatttctggttataaacgagcaagaggaatccaccgagaattgctggaactgtggaagaaaagcgagtgaaacttgcagcggctgtaatatcgccaggtactgcgggtctttctgccagcacaaggactgggagcgacatcaccggctttgtggacagaacttgcatggtcaatcaccccacggccaggggcgcccactgctccctgtgggaagaggctccagtgctaggagcgccgactgctcggtcccctccccagcactggataaaacatctgctaccacaagccggtcaagtactccggcctccgtgaccgcaattgacacgaatggtttatgaggactagtccctgttcccagagcccacttttttttctttttttgaaataaaatagcctgtctttcagatctcaaaggctcttttcagagccaccaaaaaaaaaaaaaaaaaaaaaaaaaaaaaaaaaaaaaaaaaaaaaaaaaaaaaaaaaaaaaaaaaaaaaaaaaaaaaaaaaaaaaaaaaaaaaaaaaaaaagaatt

SEQ ID NO: 1218 - RNA, 1639 nt, synthetic construct
  misc_feature 1..1639: note = Homo sapiens__Q01196-1__RUNX1(K83E_R174Q) mRNA opt4
  source 1..1639: mol_type = other RNA
aggagagtcccgcagtcggcgtccagcggctctgcttgttcgtgtgtgtgtcgttgcaggccttattcaagcttaccatgagaatccccgtggacgccagcaccagcagaagattcaccccccccagcaccgccctgagccccggcaagatgagcgaggccctgcccctgggcgcccccgacgccggcgccgccctggccggcaagctgagaagcggcgacagaagcatggtggaggtgctggccgaccaccccggcgagctggtgagaaccgacagccccaacttcctgtgcagcgtgctgcccacccactggagatgcaacgagaccctgcccatcgccttcaaggtggtggccctgggcgacgtgcccgacggcaccctggtgaccgtgatggccggcaacgacgagaactacagcgccgagctgagaaacgccaccgccgccatgaagaaccaggtggccagattcaacgacctgagattcgtgggcagaagcggcagaggcaagagcttcaccctgaccatcaccgtgttcaccaaccccccccaggtggccacctaccacagagccatcaagatcaccgtggacggcccccaggagcccagaagacacagacagaagctggacgaccagaccaagcccggcagcctgagcttcagcgagagactgagcgagctggagcagctgagaagaaccgccatgagagtgagcccccaccaccccgcccccacccccaaccccagagccagcctgaaccacagcaccgccttcaacccccagccccagagccagatgcaggacaccagacagatccagcccagccccccctggagctacgaccagagctaccagtacctgggcagcatcgccagccccagcgtgcaccccgccacccccatcagccccggcagagccagcggcatgaccaccctgagcgccgagctgagcagcagactgagcaccgcccccgacctgaccgccttcagcgaccccagacagttccccgccctgcccagcatcagcgaccccagaatgcactaccccggcgccttcacctacagccccacccccgtgaccagcggcatcggcatcggcatgagcgccatgggcagcgccaccagataccacacctacctgccccccccctaccccggcagcagccaggcccagggcggccccttccaggccagcagccccagctaccacctgtactacggcgccagcgccggcagctaccagttcagcatggtgggcggcgagagaagcccccccagaatcctgcccccctgcaccaacgccagcaccggcagcgccctgctgaaccccagcctgcccaaccagagcgacgtggtggaggccgagggcagccacagcaacagccccaccaacatggcccccagcgccagactggaggaggccgtgtggagaccctactgaggactagtccctgttcccagagcccacttttttttctttttttgaaataaaatagcctgtctttcagatctcaaaggctcttttcagagccaccaaaaaaaaaaaaaaaaaaaaaaaaaaaaaaaaaaaaaaaaaaaaaaaaaaaaaaaaaaaaaaaaaaaaaaaaaaaaaaaaaaaaaaaaaaaaaaaaaaaaagaatt

SEQ ID NO: 1219 - RNA, 2113 nt, synthetic construct
  misc_feature 1..2113: note = Homo sapiens____CBFbeta(1-165)_SMMHC(1527-1972) mRNA opt4
  source 1..2113: mol_type = other RNA
aggagagtcccgcagtcggcgtccagcggctctgcttgttcgtgtgtgtgtcgttgcaggccttattcaagcttaccatgcccagagtggtgcccgaccagagaagcaagttcgagaacgaggagttcttcagaaagctgagcagagagtgcgagatcaagtacaccggcttcagagacagaccccacgaggagagacaggccagattccagaacgcctgcagagacggcagaagcgagatcgccttcgtggccaccggcaccaacctgagcctgcagttcttccccgccagctggcagggcgagcagagacagacccccagcagagagtacgtggacctggagagagaggccggcaaggtgtacctgaaggcccccatgatcctgaacggcgtgtgcgtgatctggaagggctggatcgacctgcagagactggacggcatgggctgcctggagttcgacgaggagagagcccagcaggaggacgccctggcccagcaggccttcgaggaggccagaagaagaaccagagagttcgaggacagagacagaagccacagagaggagatggaggtgcacgagctggagaagagcaagagagccctggagacccagatggaggagatgaagacccagctggaggagctggaggacgagctgcaggccaccgaggacgccaagctgagactggaggtgaacatgcaggccctgaagggccagttcgagagagacctgcaggccagagacgagcagaacgaggagaagagaagacagctgcagagacagctgcacgagtacgagaccgagctggaggacgagagaaagcagagagccctggccgccgccgccaagaagaagctggagggcgacctgaaggacctggagctgcaggccgacagcgccatcaagggcagagaggaggccatcaagcagctgagaaagctgcaggcccagatgaaggacttccagagagagctggaggacgccagagccagcagagacgagatcttcgccaccgccaaggagaacgagaagaaggccaagagcctggaggccgacctgatgcagctgcaggaggacctggccgccgccgagagagccagaaagcaggccgacctggagaaggaggagctggccgaggagctggccagcagcctgagcggcagaaacgccctgcaggacgagaagagaagactggaggccagaatcgcccagctggaggaggagctggaggaggagcagggcaacatggaggccatgagcgacagagtgagaaaggccacccagcaggccgagcagctgagcaacgagctggccaccgagagaagcaccgcccagaagaacgagagcgccagacagcagctggagagacagaacaaggagctgagaagcaagctgcacgagatggagggcgccgtgaagagcaagttcaagagcaccatcgccgccctggaggccaagatcgcccagctggaggagcaggtggagcaggaggccagagagaagcaggccgccaccaagagcctgaagcagaaggacaagaagctgaaggagatcctgctgcaggtggaggacgagagaaagatggccgagcagtacaaggagcaggccgagaagggcaacgccagagtgaagcagctgaagagacagctggaggaggccgaggaggagagccagagaatcaacgccaacagaagaaagctgcagagagagctggacgaggccaccgagagcaacgaggccatgggcagagaggtgaacgccctgaagagcaagctgagaagaggcaacgagaccagcttcgtgcccagcagaagaagcggcggcagaagagtgatcgagaacgccgacggcagcgaggaggagaccgacaccagagacgccgacttcaacggcaccaaggccagcgagtgaggactagtccctgttcccagagcccacttttttttctttttttgaaataaaatagcctgtctttcagatctcaaaggctcttttcagagccaccaaaaaaaaaaaaaaaaaaaaaaaaaaaaaaaaaaaaaaaaaaaaaaaaaaaaaaaaaaaaaaaaaaaaaaaaaaaaaaaaaaaaaaaaaaaaaaaaaaaaagaatt

SEQ ID NO: 1220 - RNA, 1828 nt, synthetic construct
  misc_feature 1..1828: note = Artificial____CBFbeta(1-165)_SMMHC(1527-1877) mRNA opt4
  source 1..1828: mol_type = other RNA
aggagagtcccgcagtcggcgtccagcggctctgcttgttcgtgtgtgtgtcgttgcaggccttattcaagcttaccatgcccagagtggtgcccgaccagagaagcaagttcgagaacgaggagttcttcagaaagctgagcagagagtgcgagatcaagtacaccggcttcagagacagaccccacgaggagagacaggccagattccagaacgcctgcagagacggcagaagcgagatcgccttcgtggccaccggcaccaacctgagcctgcagttcttccccgccagctggcagggcgagcagagacagacccccagcagagagtacgtggacctggagagagaggccggcaaggtgtacctgaaggcccccatgatcctgaacggcgtgtgcgtgatctggaagggctggatcgacctgcagagactggacggcatgggctgcctggagttcgacgaggagagagcccagcaggaggacgccctggcccagcaggccttcgaggaggccagaagaagaaccagagagttcgaggacagagacagaagccacagagaggagatggaggtgcacgagctggagaagagcaagagagccctggagacccagatggaggagatgaagacccagctggaggagctggaggacgagctgcaggccaccgaggacgccaagctgagactggaggtgaacatgcaggccctgaagggccagttcgagagagacctgcaggccagagacgagcagaacgaggagaagagaagacagctgcagagacagctgcacgagtacgagaccgagctggaggacgagagaaagcagagagccctggccgccgccgccaagaagaagctggagggcgacctgaaggacctggagctgcaggccgacagcgccatcaagggcagagaggaggccatcaagcagctgagaaagctgcaggcccagatgaaggacttccagagagagctggaggacgccagagccagcagagacgagatcttcgccaccgccaaggagaacgagaagaaggccaagagcctggaggccgacctgatgcagctgcaggaggacctggccgccgccgagagagccagaaagcaggccgacctggagaaggaggagctggccgaggagctggccagcagcctgagcggcagaaacgccctgcaggacgagaagagaagactggaggccagaatcgcccagctggaggaggagctggaggaggagcagggcaacatggaggccatgagcgacagagtgagaaaggccacccagcaggccgagcagctgagcaacgagctggccaccgagagaagcaccgcccagaagaacgagagcgccagacagcagctggagagacagaacaaggagctgagaagcaagctgcacgagatggagggcgccgtgaagagcaagttcaagagcaccatcgccgccctggaggccaagatcgcccagctggaggagcaggtggagcaggaggccagagagaagcaggccgccaccaagagcctgaagcagaaggacaagaagctgaaggagatcctgctgcaggtggaggacgagagaaagatggccgagcagtacaaggagcaggccgagaagggcaacgcctgaggactagtccctgttcccagagcccacttttttttctttttttgaaataaaatagcctgtctttcagatctcaaaggctcttttcagagccaccaaaaaaaaaaaaaaaaaaaaaaaaaaaaaaaaaaaaaaaaaaaaaaaaaaaaaaaaaaaaaaaaaaaaaaaaaaaaaaaaaaaaaaaaaaaaaaaaaaaaagaatt

SEQ ID NO: 1221 - RNA, 889 nt, synthetic construct
  misc_feature 1..889: note = Artificial____CBFbeta(1-165)_Linker_Lifeact mRNA opt4
  source 1..889: mol_type = other RNA
aggagagtcccgcagtcggcgtccagcggctctgcttgttcgtgtgtgtgtcgttgcaggccttattcaagcttaccatgcccagagtggtgcccgaccagagaagcaagttcgagaacgaggagttcttcagaaagctgagcagagagtgcgagatcaagtacaccggcttcagagacagaccccacgaggagagacaggccagattccagaacgcctgcagagacggcagaagcgagatcgccttcgtggccaccggcaccaacctgagcctgcagttcttccccgccagctggcagggcgagcagagacagacccccagcagagagtacgtggacctggagagagaggccggcaaggtgtacctgaaggcccccatgatcctgaacggcgtgtgcgtgatctggaagggctggatcgacctgcagagactggacggcatgggctgcctggagttcgacgaggagagagcccagcaggaggacgccctggcccagcaggccttcgaggaggccagaagaagaaccagagagttcgaggacagagacagaagccacagagaggagatggagggcggcagcggcggcagcggcggcagcggcggcagcggcggcggcggcgtggccgacctgatcaagaagttcgagagcatcagcaaggaggagggcgacccccccgtggccacctgaggactagtccctgttcccagagcccacttttttttctttttttgaaataaaatagcctgtctttcagatctcaaaggctcttttcagagccaccaaaaaaaaaaaaaaaaaaaaaaaaaaaaaaaaaaaaaaaaaaaaaaaaaaaaaaaaaaaaaaaaaaaaaaaaaaaaaaaaaaaaaaaaaaaaaaaaaaaaagaatt

SEQ ID NO: 1222 - RNA, 856 nt, synthetic construct
  misc_feature 1..856: note = Artificial____CBFbeta(1-165)_HIF1alpha(549-575) mRNA opt4
  source 1..856: mol_type = other RNA
aggagagtcccgcagtcggcgtccagcggctctgcttgttcgtgtgtgtgtcgttgcaggccttattcaagcttaccatgcccagagtggtgcccgaccagagaagcaagttcgagaacgaggagttcttcagaaagctgagcagagagtgcgagatcaagtacaccggcttcagagacagaccccacgaggagagacaggccagattccagaacgcctgcagagacggcagaagcgagatcgccttcgtggccaccggcaccaacctgagcctgcagttcttccccgccagctggcagggcgagcagagacagacccccagcagagagtacgtggacctggagagagaggccggcaaggtgtacctgaaggcccccatgatcctgaacggcgtgtgcgtgatctggaagggctggatcgacctgcagagactggacggcatgggctgcctggagttcgacgaggagagagcccagcaggaggacgccctggcccagcaggccttcgaggaggccagaagaagaaccagagagttcgaggacagagacagaagccacagagaggagatggagcccttcagcacccaggacaccgacctggacctggagatgctggccccctacatccccatggacgacgacttccagctgagatgaggactagtccctgttcccagagcccacttttttttctttttttgaaataaaatagcctgtctttcagatctcaaaggctcttttcagagccaccaaaaaaaaaaaaaaaaaaaaaaaaaaaaaaaaaaaaaaaaaaaaaaaaaaaaaaaaaaaaaaaaaaaaaaaaaaaaaaaaaaaaaaaaaaaaaaaaaaaaagaatt

SEQ ID NO: 1223 - RNA, 901 nt, synthetic construct
  misc_feature 1..901: note Artificial____CBFbeta(1-165)_Linker_HIF1alpha(549-575) mRNA opt4
  source 1..901: mol_type = other RNA
aggagagtcccgcagtcggcgtccagcggctctgcttgttcgtgtgtgtgtcgttgcaggccttattcaagcttaccatgcccagagtggtgcccgaccagagaagcaagttcgagaacgaggagttcttcagaaagctgagcagagagtgcgagatcaagtacaccggcttcagagacagaccccacgaggagagacaggccagattccagaacgcctgcagagacggcagaagcgagatcgccttcgtggccaccggcaccaacctgagcctgcagttcttccccgccagctggcagggcgagcagagacagacccccagcagagagtacgtggacctggagagagaggccggcaaggtgtacctgaaggcccccatgatcctgaacggcgtgtgcgtgatctggaagggctggatcgacctgcagagactggacggcatgggctgcctggagttcgacgaggagagagcccagcaggaggacgccctggcccagcaggccttcgaggaggccagaagaagaaccagagagttcgaggacagagacagaagccacagagaggagatggagggcggcagcggcggcagcggcggcagcggcggcagcggcggcggccccttcagcacccaggacaccgacctggacctggagatgctggccccctacatccccatggacgacgacttccagctgagatgaggactagtccctgttcccagagcccacttttttttctttttttgaaataaaatagcctgtctttcagatctcaaaggctcttttcagagccaccaaaaaaaaaaaaaaaaaaaaaaaaaaaaaaaaaaaaaaaaaaaaaaaaaaaaaaaaaaaaaaaaaaaaaaaaaaaaaaaaaaaaaaaaaaaaaaaaaaaaagaatt

SEQ ID NO: 1224 - RNA, 2536 nt, synthetic construct
  misc_feature 1..2536: note = Artificial____RUNX1(1-177)_N_RUNX1T1a(31-604) mRNA opt4
  source 1..2536: mol_type = other RNA
aggagagtcccgcagtcggcgtccagcggctctgcttgttcgtgtgtgtgtcgttgcaggccttattcaagcttaccatgagaatccccgtggacgccagcaccagcagaagattcaccccccccagcaccgccctgagccccggcaagatgagcgaggccctgcccctgggcgcccccgacgccggcgccgccctggccggcaagctgagaagcggcgacagaagcatggtggaggtgctggccgaccaccccggcgagctggtgagaaccgacagccccaacttcctgtgcagcgtgctgcccacccactggagatgcaacaagaccctgcccatcgccttcaaggtggtggccctgggcgacgtgcccgacggcaccctggtgaccgtgatggccggcaacgacgagaactacagcgccgagctgagaaacgccaccgccgccatgaagaaccaggtggccagattcaacgacctgagattcgtgggcagaagcggcagaggcaagagcttcaccctgaccatcaccgtgttcaccaaccccccccaggtggccacctaccacagagccatcaagatcaccgtggacggccccagagagcccagaaacagaaccgagaagcacagcaccatgcccgacagccccgtggacgtgaagacccagagcagactgaccccccccaccatgccccccccccccaccacccagggcgcccccagaaccagcagcttcacccccaccaccctgaccaacggcaccagccacagccccaccgccctgaacggcgcccccagcccccccaacggcttcagcaacggccccagcagcagcagcagcagcagcctggccaaccagcagctgccccccgcctgcggcgccagacagctgagcaagctgaagagattcctgaccaccctgcagcagttcggcaacgacatcagccccgagatcggcgagagagtgagaaccctggtgctgggcctggtgaacagcaccctgaccatcgaggagttccacagcaagctgcaggaggccaccaacttccccctgagacccttcgtgatccccttcctgaaggccaacctgcccctgctgcagagagagctgctgcactgcgccagactggccaagcagaaccccgcccagtacctggcccagcacgagcagctgctgctggacgccagcaccaccagccccgtggacagcagcgagctgctgctggacgtgaacgagaacggcaagagaagaacccccgacagaaccaaggagaacggcttcgacagagagcccctgcacagcgagcaccccagcaagagaccctgcaccatcagccccggccagagatacagccccaacaacggcctgagctaccagcccaacggcctgccccaccccacccccccccccccccagcactacagactggacgacatggccatcgcccaccactacagagacagctacagacaccccagccacagagacctgagagacagaaacagacccatgggcctgcacggcaccagacaggaggagatgatcgaccacagactgaccgacagagagtgggccgaggagtggaagcacctggaccacctgctgaactgcatcatggacatggtggagaagaccagaagaagcctgaccgtgctgagaagatgccaggaggccgacagagaggagctgaactactggatcagaagatacagcgacgccgaggacctgaagaagggcggcggcagcagcagcagccacagcagacagcagagccccgtgaaccccgaccccgtggccctggacgcccacagagagttcctgcacagacccgccagcggctacgtgcccgaggagatctggaagaaggccgaggaggccgtgaacgaggtgaagagacaggccatgaccgagctgcagaaggccgtgagcgaggccgagagaaaggcccacgacatgatcaccaccgagagagccaagatggagagaaccgtggccgaggccaagagacaggccgccgaggacgccctggccgtgatcaaccagcaggaggacagcagcgagagctgctggaactgcggcagaaaggccagcgagacctgcagcggctgcaacaccgccagatactgcggcagcttctgccagcacaaggactgggagaagcaccaccacatctgcggccagaccctgcaggcccagcagcagggcgacacccccgccgtgagcagcagcgtgacccccaacagcggcgccggcagccccatggacaccccccccgccgccacccccagaagcaccacccccggcacccccagcaccatcgagaccacccccagatgaggactagtccctgttcccagagcccacttttttttctttttttgaaataaaatagcctgtctttcagatctcaaaggctcttttcagagccaccaaaaaaaaaaaaaaaaaaaaaaaaaaaaaaaaaaaaaaaaaaaaaaaaaaaaaaaaaaaaaaaaaaaaaaaaaaaaaaaaaaaaaaaaaaaaaaaaaaaaagaatt

SEQ ID NO: 1225 - RNA, 1051 nt, synthetic construct
  misc_feature 1..1051: note = Artificial____RUNX1(1-241)_RUNX1T1b(short) mRNA opt4
  source 1..1051: mol_type = other RNA
aggagagtcccgcagtcggcgtccagcggctctgcttgttcgtgtgtgtgtcgttgcaggccttattcaagcttaccatgagaatccccgtggacgccagcaccagcagaagattcaccccccccagcaccgccctgagccccggcaagatgagcgaggccctgcccctgggcgcccccgacgccggcgccgccctggccggcaagctgagaagcggcgacagaagcatggtggaggtgctggccgaccaccccggcgagctggtgagaaccgacagccccaacttcctgtgcagcgtgctgcccacccactggagatgcaacaagaccctgcccatcgccttcaaggtggtggccctgggcgacgtgcccgacggcaccctggtgaccgtgatggccggcaacgacgagaactacagcgccgagctgagaaacgccaccgccgccatgaagaaccaggtggccagattcaacgacctgagattcgtgggcagaagcggcagaggcaagagcttcaccctgaccatcaccgtgttcaccaaccccccccaggtggccacctaccacagagccatcaagatcaccgtggacggccccagagagcccagaagacacagacagaagctggacgaccagaccaagcccggcagcctgagcttcagcgagagactgagcgagctggagcagctgagaagaaccgccatgagagtgagcccccaccaccccgcccccacccccaaccccagagccagcctgaaccacagcaccgccttcaacccccagccccagagccagatgcaggaggtgggcttctgccacgtggcccaggtgggcctgaagctgctgggctgaggactagtccctgttcccagagcccacttttttttctttttttgaaataaaatagcctgtctttcagatctcaaaggctcttttcagagccaccaaaaaaaaaaaaaaaaaaaaaaaaaaaaaaaaaaaaaaaaaaaaaaaaaaaaaaaaaaaaaaaaaaaaaaaaaaaaaaaaaaaaaaaaaaaaaaaaaaaaagaatt

SEQ ID NO: 1226 - RNA, 2755 nt, synthetic construct
  misc_feature 1..2755: note = Artificial____RUNX1(1-241)_V_RUNX1T1b(22-604) mRNA opt4
  source 1..2755: mol_type = other RNA
aggagagtcccgcagtcggcgtccagcggctctgcttgttcgtgtgtgtgtcgttgcaggccttattcaagcttaccatgagaatccccgtggacgccagcaccagcagaagattcaccccccccagcaccgccctgagccccggcaagatgagcgaggccctgcccctgggcgcccccgacgccggcgccgccctggccggcaagctgagaagcggcgacagaagcatggtggaggtgctggccgaccaccccggcgagctggtgagaaccgacagccccaacttcctgtgcagcgtgctgcccacccactggagatgcaacaagaccctgcccatcgccttcaaggtggtggccctgggcgacgtgcccgacggcaccctggtgaccgtgatggccggcaacgacgagaactacagcgccgagctgagaaacgccaccgccgccatgaagaaccaggtggccagattcaacgacctgagattcgtgggcagaagcggcagaggcaagagcttcaccctgaccatcaccgtgttcaccaaccccccccaggtggccacctaccacagagccatcaagatcaccgtggacggccccagagagcccagaagacacagacagaagctggacgaccagaccaagcccggcagcctgagcttcagcgagagactgagcgagctggagcagctgagaagaaccgccatgagagtgagcccccaccaccccgcccccacccccaaccccagagccagcctgaaccacagcaccgccttcaacccccagccccagagccagatgcaggtgggccccgagaagagagtgcccgccatgcccggcagccccgtggaggtgaagatccagagcagaagcagcccccccaccatgccccccctgccccccatcaaccccggcggccccagacccgtgagcttcacccccaccgccctgagcaacggcatcaaccacagcccccccaccctgaacggcgcccccagccccccccagagattcagcaacggccccgccagcagcaccagcagcgccctgaccaaccagcagctgcccgccacctgcggcgccagacagctgagcaagctgaagagattcctgaccaccctgcagcagttcggcaacgacatcagccccgagatcggcgagaaggtgagaaccctggtgctggccctggtgaacagcaccgtgaccatcgaggagttccactgcaagctgcaggaggccaccaacttccccctgagacccttcgtgatccccttcctgaaggccaacctgcccctgctgcagagagagctgctgcactgcgccagagccgccaagcagacccccagccagtacctggcccagcacgagcacctgctgctgaacaccagcatcgccagccccgccgacagcagcgagctgctgatggaggtgcacggcaacggcaagagacccagccccgagagaagagaggagaacagcttcgacagagacaccatcgcccccgagccccccgccaagagagtgtgcaccatcagccccgcccccagacacagccccgccctgaccgtgcccctgatgaaccccggcggccagttccaccccacccccccccccctgcagcactacaccctggaggacatcgccaccagccacctgtacagagagcccaacaagatgctggagcacagagaggtgagagacagacaccacagcctgggcctgaacggcggctaccaggacgagctggtggaccacagactgaccgagagagagtgggccgacgagtggaagcacctggaccacgccctgaactgcatcatggagatggtggagaagaccagaagaagcatggccgtgctgagaagatgccaggagagcgacagagaggagctgaactactggaagagaagatacaacgagaacaccgagctgagaaagaccggcaccgagctggtgagcagacagcacagccccggcagcgccgacagcctgagcaacgacagccagagagagttcaacagcagacccggcaccggctacgtgcccgtggagttctggaagaagaccgaggaggccgtgaacaaggtgaagatccaggccatgagcgaggtgcagaaggccgtggccgaggccgagcagaaggccttcgaggtgatcgccaccgagagagccagaatggagcagaccatcgccgacgtgaagagacaggccgccgaggacgccttcctggtgatcaacgagcaggaggagagcaccgagaactgctggaactgcggcagaaaggccagcgagacctgcagcggctgcaacatcgccagatactgcggcagcttctgccagcacaaggactgggagagacaccacagactgtgcggccagaacctgcacggccagagcccccacggccagggcagacccctgctgcccgtgggcagaggcagcagcgccagaagcgccgactgcagcgtgcccagccccgccctggacaagaccagcgccaccaccagcagaagcagcacccccgccagcgtgaccgccatcgacaccaacggcctgtgaggactagtccctgttcccagagcccacttttttttctttttttgaaataaaatagcctgtctttcagatctcaaaggctcttttcagagccaccaaaaaaaaaaaaaaaaaaaaaaaaaaaaaaaaaaaaaaaaaaaaaaaaaaaaaaaaaaaaaaaaaaaaaaaaaaaaaaaaaaaaaaaaaaaaaaaaaaaaagaatt

SEQ ID NO: 1227 - RNA, 2755 nt, synthetic construct
  misc_feature 1..2755: note = Artificial____RUNX1(1-241)_I_RUNX1T1b(22-604) mRNA opt4
  source 1..2755: mol_type = other RNA
aggagagtcccgcagtcggcgtccagcggctctgcttgttcgtgtgtgtgtcgttgcaggccttattcaagcttaccatgagaatccccgtggacgccagcaccagcagaagattcaccccccccagcaccgccctgagccccggcaagatgagcgaggccctgcccctgggcgcccccgacgccggcgccgccctggccggcaagctgagaagcggcgacagaagcatggtggaggtgctggccgaccaccccggcgagctggtgagaaccgacagccccaacttcctgtgcagcgtgctgcccacccactggagatgcaacaagaccctgcccatcgccttcaaggtggtggccctgggcgacgtgcccgacggcaccctggtgaccgtgatggccggcaacgacgagaactacagcgccgagctgagaaacgccaccgccgccatgaagaaccaggtggccagattcaacgacctgagattcgtgggcagaagcggcagaggcaagagcttcaccctgaccatcaccgtgttcaccaaccccccccaggtggccacctaccacagagccatcaagatcaccgtggacggccccagagagcccagaagacacagacagaagctggacgaccagaccaagcccggcagcctgagcttcagcgagagactgagcgagctggagcagctgagaagaaccgccatgagagtgagcccccaccaccccgcccccacccccaaccccagagccagcctgaaccacagcaccgccttcaacccccagccccagagccagatgcagatcggccccgagaagagagtgcccgccatgcccggcagccccgtggaggtgaagatccagagcagaagcagcccccccaccatgccccccctgccccccatcaaccccggcggccccagacccgtgagcttcacccccaccgccctgagcaacggcatcaaccacagcccccccaccctgaacggcgcccccagccccccccagagattcagcaacggccccgccagcagcaccagcagcgccctgaccaaccagcagctgcccgccacctgcggcgccagacagctgagcaagctgaagagattcctgaccaccctgcagcagttcggcaacgacatcagccccgagatcggcgagaaggtgagaaccctggtgctggccctggtgaacagcaccgtgaccatcgaggagttccactgcaagctgcaggaggccaccaacttccccctgagacccttcgtgatccccttcctgaaggccaacctgcccctgctgcagagagagctgctgcactgcgccagagccgccaagcagacccccagccagtacctggcccagcacgagcacctgctgctgaacaccagcatcgccagccccgccgacagcagcgagctgctgatggaggtgcacggcaacggcaagagacccagccccgagagaagagaggagaacagcttcgacagagacaccatcgcccccgagccccccgccaagagagtgtgcaccatcagccccgcccccagacacagccccgccctgaccgtgcccctgatgaaccccggcggccagttccaccccacccccccccccctgcagcactacaccctggaggacatcgccaccagccacctgtacagagagcccaacaagatgctggagcacagagaggtgagagacagacaccacagcctgggcctgaacggcggctaccaggacgagctggtggaccacagactgaccgagagagagtgggccgacgagtggaagcacctggaccacgccctgaactgcatcatggagatggtggagaagaccagaagaagcatggccgtgctgagaagatgccaggagagcgacagagaggagctgaactactggaagagaagatacaacgagaacaccgagctgagaaagaccggcaccgagctggtgagcagacagcacagccccggcagcgccgacagcctgagcaacgacagccagagagagttcaacagcagacccggcaccggctacgtgcccgtggagttctggaagaagaccgaggaggccgtgaacaaggtgaagatccaggccatgagcgaggtgcagaaggccgtggccgaggccgagcagaaggccttcgaggtgatcgccaccgagagagccagaatggagcagaccatcgccgacgtgaagagacaggccgccgaggacgccttcctggtgatcaacgagcaggaggagagcaccgagaactgctggaactgcggcagaaaggccagcgagacctgcagcggctgcaacatcgccagatactgcggcagcttctgccagcacaaggactgggagagacaccacagactgtgcggccagaacctgcacggccagagcccccacggccagggcagacccctgctgcccgtgggcagaggcagcagcgccagaagcgccgactgcagcgtgcccagccccgccctggacaagaccagcgccaccaccagcagaagcagcacccccgccagcgtgaccgccatcgacaccaacggcctgtgaggactagtccctgttcccagagcccacttttttttctttttttgaaataaaatagcctgtctttcagatctcaaaggctcttttcagagccaccaaaaaaaaaaaaaaaaaaaaaaaaaaaaaaaaaaaaaaaaaaaaaaaaaaaaaaaaaaaaaaaaaaaaaaaaaaaaaaaaaaaaaaaaaaaaaaaaaaaaagaatt

SEQ ID NO: 1228 - RNA, 1639 nt, synthetic construct
  misc_feature 1..1639: note = Homo sapiens__Q01196-1__RUNX1(K83E_R174Q) mRNA opt5
  source 1..1639: mol_type = other RNA
aggagagtcccgcagtcggcgtccagcggctctgcttgttcgtgtgtgtgtcgttgcaggccttattcaagcttaccatgagaatccccgtggacgccagcacctcccggcgcttcacacctccgtctacggctctgagccccggcaagatgtccgaggccctccctctgggggcgcccgatgctggagccgcccttgctggcaaactgagatctggggaccggagcatggtcgaagttctcgccgatcaccctggagagctggtgcgcaccgactcccccaactttctttgctctgtgctgcctacacattggagatgtaatgaaaccctcccgattgctttcaaggtcgtggccctgggcgatgttcccgacgggacactggtgaccgtcatggcgggaaacgatgagaattacagcgccgaactccggaacgctacagccgctatgaaaaatcaggtggcccgctttaacgacctgagattcgttggccggtccggccgcggaaagagctttacccttacgatcaccgtgttcacaaatcctccccaagtcgcgacctatcacagagccattaaaatcacagtggatgggcctcaggagccccggcgccatagacagaagctggacgatcagaccaagccgggctctctctcctttagcgagcggctgtctgaacttgagcaactgcgcagaacggctatgcgggtgtcccctcaccatcccgcccctacacccaaccccagagctagcctcaatcactctaccgccttcaaccctcagccgcagtcccagatgcaagacacacgccagattcagcccagccctccctggtcctacgatcagtcttatcaatacctggggagcatcgcctcccctagcgtccaccccgctaccccgatctctcctggacgggcgtccggcatgaccacactgagcgccgaactctctagcagactgtccacggctcccgaccttaccgccttttctgaccctcgccagttccccgccctgcctagcatttccgatccccggatgcattatccgggggcttttacatacagccctacccccgttacatctggaatcggcattggcatgtccgccatggggagcgcgaccagatatcacacgtacctgccccctccgtaccccggatcttcccaggctcaaggcgggcctttccaggccagctccccctcttatcatctctactatggagccagcgctggctcctaccagttttctatggtcgggggagagcgcagccctccccggatccttcctccctgcacaaatgcctccaccggcagcgctctgctcaacccgtctctgcctaatcagtccgacgtggtggaggccgaaggcagccactctaactcccccaccaatatggcgcctagcgccagactggaggaagctgtgtggcgcccctattgaggactagtccctgttcccagagcccacttttttttctttttttgaaataaaatagcctgtctttcagatctcaaaggctcttttcagagccaccaaaaaaaaaaaaaaaaaaaaaaaaaaaaaaaaaaaaaaaaaaaaaaaaaaaaaaaaaaaaaaaaaaaaaaaaaaaaaaaaaaaaaaaaaaaaaaaaaaaaagaatt

SEQ ID NO: 1229 - RNA, 2113 nt, synthetic construct
  misc_feature 1..2113: note = Homo sapiens____CBFbeta(1-165)_SMMHC(1527-1972) mRNA opt5
  source 1..2113: mol_type = other RNA
aggagagtcccgcagtcggcgtccagcggctctgcttgttcgtgtgtgtgtcgttgcaggccttattcaagcttaccatgcccagagtggtccctgaccagcggagcaagttcgagaacgaagagtttttccgcaaactgtccagagaatgcgagatcaagtacaccggctttcgggatcgcccgcacgaagagagacaagcccggttccagaatgcttgtcgcgacgggagatctgagattgcctttgttgcgacaggaacgaacctcagcctgcagttctttcccgcttcctggcagggcgaacaacggcagaccccttctcgcgagtatgtggatcttgaaagagaggccgggaaagtgtacctgaaggcccccatgatcctcaatggagtctgcgtgatttggaaaggctggatcgacctgcagcggcttgatgggatgggatgtctggagttcgacgaggaacgcgctcagcaagaagatgccctcgctcagcaggcctttgaggaagcgagacggcgcacaagagagttcgaggaccgggatagaagccatcgcgaagagatggaagttcacgagctggaaaagtccaagcgggccctggagacccagatggaggaaatgaaaacacaactcgaggaactggaggacgaacttcaggctaccgaggatgccaagctgagactcgaggtgaacatgcaggctctgaaaggccaatttgaacgcgaccttcaggcccgggatgagcagaatgaagagaagagacgccagctgcaacggcagctccatgagtatgaaacagagctggaagacgagagaaaacagcgcgcgctggccgctgccgctaagaagaaactcgaaggcgacctgaaggatcttgagctgcaggccgactctgccattaaagggcgggaggaagctatcaagcaactcagaaaactgcaggcgcagatgaaggatttccagcgcgagcttgaagacgcccgggctagcagagatgagatctttgccaccgccaaagaaaacgagaagaaggctaaatccctggaggccgacctcatgcaactgcaggaagatctggcggctgccgagcgggcccgcaagcaggctgacctcgaaaaagaggaactggccgaggagcttgctagctctctgtccggaagaaatgccctccaggatgaaaagcggagactggaggcgcgcattgcccaacttgaagaggagctggaagaggaacagggcaacatggaggctatgagcgaccgggtcagaaaagccacgcagcaagctgaacagctctctaatgagctggccaccgagcgctccacagcgcagaagaacgaaagcgccagacagcaactggagcggcagaataaggaactccgctctaaactgcacgagatggaaggggctgtgaagtccaaattcaagagcaccatcgccgctcttgaggccaaaattgcccagctggaggaacaggttgagcaagaagctagagagaagcaggcggccacaaagtccctcaaacagaaggataaaaagctgaaagaaatcctgcttcaggtggaggacgagcggaagatggctgaacaatacaaggagcaggccgaaaaaggaaacgcccgcgtcaagcagctcaaaagacaactggaggaggctgaagaggaatctcagcggattaatgccaaccgcagaaagctgcagcgggagctcgacgaagcgaccgagagcaatgaggctatgggccgcgaagtgaacgccctgaaatccaaacttagacgggggaacgagacgagcttcgtgccttctagacgctccggaggccggagagtcatcgaaaatgccgatggcagcgaggaagagacagacacccgcgatgctgactttaacgggacaaaggcctctgagtgaggactagtccctgttcccagagcccacttttttttctttttttgaaataaaatagcctgtctttcagatctcaaaggctcttttcagagccaccaaaaaaaaaaaaaaaaaaaaaaaaaaaaaaaaaaaaaaaaaaaaaaaaaaaaaaaaaaaaaaaaaaaaaaaaaaaaaaaaaaaaaaaaaaaaaaaaaaaaagaatt

SEQ ID NO: 1230 - RNA, 1828 nt, synthetic construct
  misc_feature 1..1828: note = Artificial____CBFbeta(1-165)_SMMHC(1527-1877) mRNA opt5
  source 1..1828: mol_type = other RNA
aggagagtcccgcagtcggcgtccagcggctctgcttgttcgtgtgtgtgtcgttgcaggccttattcaagcttaccatgcccagagtggtccctgaccagcggagcaagttcgagaacgaagagtttttccgcaaactgtccagagaatgcgagatcaagtacaccggctttcgggatcgcccgcacgaagagagacaagcccggttccagaatgcttgtcgcgacgggagatctgagattgcctttgttgcgacaggaacgaacctcagcctgcagttctttcccgcttcctggcagggcgaacaacggcagaccccttctcgcgagtatgtggatcttgaaagagaggccgggaaagtgtacctgaaggcccccatgatcctcaatggagtctgcgtgatttggaaaggctggatcgacctgcagcggcttgatgggatgggatgtctggagttcgacgaggaacgcgctcagcaagaagatgccctcgctcagcaggcctttgaggaagcgagacggcgcacaagagagttcgaggaccgggatagaagccatcgcgaagagatggaagttcacgagctggaaaagtccaagcgggccctggagacccagatggaggaaatgaaaacacaactcgaggaactggaggacgaacttcaggctaccgaggatgccaagctgagactcgaggtgaacatgcaggctctgaaaggccaatttgaacgcgaccttcaggcccgggatgagcagaatgaagagaagagacgccagctgcaacggcagctccatgagtatgaaacagagctggaagacgagagaaaacagcgcgcgctggccgctgccgctaagaagaaactcgaaggcgacctgaaggatcttgagctgcaggccgactctgccattaaagggcgggaggaagctatcaagcaactcagaaaactgcaggcgcagatgaaggatttccagcgcgagcttgaagacgcccgggctagcagagatgagatctttgccaccgccaaagaaaacgagaagaaggctaaatccctggaggccgacctcatgcaactgcaggaagatctggcggctgccgagcgggcccgcaagcaggctgacctcgaaaaagaggaactggccgaggagcttgctagctctctgtccggaagaaatgccctccaggatgaaaagcggagactggaggcgcgcattgcccaacttgaagaggagctggaagaggaacagggcaacatggaggctatgagcgaccgggtcagaaaagccacgcagcaagctgaacagctctctaatgagctggccaccgagcgctccacagcgcagaagaacgaaagcgccagacagcaactggagcggcagaataaggaactccgctctaaactgcacgagatggaaggggctgtgaagtccaaattcaagagcaccatcgccgctcttgaggccaaaattgcccagctggaggaacaggttgagcaagaagctagagagaagcaggcggccacaaagtccctcaaacagaaggataaaaagctgaaagaaatcctgcttcaggtggaggacgagcggaagatggctgaacaatacaaggagcaggccgaaaaaggaaacgcctgaggactagtccctgttcccagagcccacttttttttctttttttgaaataaaatagcctgtctttcagatctcaaaggctcttttcagagccaccaaaaaaaaaaaaaaaaaaaaaaaaaaaaaaaaaaaaaaaaaaaaaaaaaaaaaaaaaaaaaaaaaaaaaaaaaaaaaaaaaaaaaaaaaaaaaaaaaaaaagaatt

SEQ ID NO: 1231 - RNA, 889 nt, synthetic construct
  misc_feature 1..889: note = Artificial____CBFbeta(1-165)_Linker_Lifeact mRNA opt5
  source 1..889: mol_type = other RNA
aggagagtcccgcagtcggcgtccagcggctctgcttgttcgtgtgtgtgtcgttgcaggccttattcaagcttaccatgcccagagtggtccctgaccagcggagcaagttcgagaacgaagagtttttccgcaaactgtccagagaatgcgagatcaagtacaccggctttcgggatcgcccgcacgaagagagacaagcccggttccagaatgcttgtcgcgacgggagatctgagattgcctttgttgcgacaggaacgaacctcagcctgcagttctttcccgcttcctggcagggcgaacaacggcagaccccttctcgcgagtatgtggatcttgaaagagaggccgggaaagtgtacctgaaggcccccatgatcctcaatggagtctgcgtgatttggaaaggctggatcgacctgcagcggcttgatgggatgggatgtctggagttcgacgaggaacgcgctcagcaagaagatgccctcgctcagcaggcctttgaggaagcgagacggcgcacaagagagttcgaggaccgggatagaagccatcgcgaagagatggaaggcggctccgggggatctggcgggagcggaggctccgggggaggcggcgttgccgacctgattaagaagtttgagagcatctctaaagaagagggggatcctcccgtggctacctgaggactagtccctgttcccagagcccacttttttttctttttttgaaataaaatagcctgtctttcagatctcaaaggctcttttcagagccaccaaaaaaaaaaaaaaaaaaaaaaaaaaaaaaaaaaaaaaaaaaaaaaaaaaaaaaaaaaaaaaaaaaaaaaaaaaaaaaaaaaaaaaaaaaaaaaaaaaaaagaatt

SEQ ID NO: 1232 - RNA, 856 nt, synthetic construct
  misc_feature 1..856: note = Artificial____CBFbeta(1-165)_HIF1alpha(549-575) mRNA opt5
  source 1..856: mol_type = other RNA
aggagagtcccgcagtcggcgtccagcggctctgcttgttcgtgtgtgtgtcgttgcaggccttattcaagcttaccatgcccagagtggtccctgaccagcggagcaagttcgagaacgaagagtttttccgcaaactgtccagagaatgcgagatcaagtacaccggctttcgggatcgcccgcacgaagagagacaagcccggttccagaatgcttgtcgcgacgggagatctgagattgcctttgttgcgacaggaacgaacctcagcctgcagttctttcccgcttcctggcagggcgaacaacggcagaccccttctcgcgagtatgtggatcttgaaagagaggccgggaaagtgtacctgaaggcccccatgatcctcaatggagtctgcgtgatttggaaaggctggatcgacctgcagcggcttgatgggatgggatgtctggagttcgacgaggaacgcgctcagcaagaagatgccctcgctcagcaggcctttgaggaagcgagacggcgcacaagagagttcgaggaccgggatagaagccatcgcgaagagatggaacctttttccacccaggacacagatctggacctggagatgctcgccccctatattcctatggatgacgacttccaactgcggtgaggactagtccctgttcccagagcccacttttttttctttttttgaaataaaatagcctgtctttcagatctcaaaggctcttttcagagccaccaaaaaaaaaaaaaaaaaaaaaaaaaaaaaaaaaaaaaaaaaaaaaaaaaaaaaaaaaaaaaaaaaaaaaaaaaaaaaaaaaaaaaaaaaaaaaaaaaaaaagaatt

SEQ ID NO: 1233 - RNA, 901 nt, synthetic construct
  misc_feature 1..901: note Artificial____CBFbeta(1-165)_Linker_HIF1alpha(549-575) mRNA opt5
  source 1..901: mol_type = other RNA
aggagagtcccgcagtcggcgtccagcggctctgcttgttcgtgtgtgtgtcgttgcaggccttattcaagcttaccatgcccagagtggtccctgaccagcggagcaagttcgagaacgaagagtttttccgcaaactgtccagagaatgcgagatcaagtacaccggctttcgggatcgcccgcacgaagagagacaagcccggttccagaatgcttgtcgcgacgggagatctgagattgcctttgttgcgacaggaacgaacctcagcctgcagttctttcccgcttcctggcagggcgaacaacggcagaccccttctcgcgagtatgtggatcttgaaagagaggccgggaaagtgtacctgaaggcccccatgatcctcaatggagtctgcgtgatttggaaaggctggatcgacctgcagcggcttgatgggatgggatgtctggagttcgacgaggaacgcgctcagcaagaagatgccctcgctcagcaggcctttgaggaagcgagacggcgcacaagagagttcgaggaccgggatagaagccatcgcgaagagatggaaggcggctccgggggatctggcgggagcggaggctccgggggaggcccttttagcacccaggacacagatctggacctggagatgctcgccccctatattcctatggatgacgacttccaactgcggtgaggactagtccctgttcccagagcccacttttttttctttttttgaaataaaatagcctgtctttcagatctcaaaggctcttttcagagccaccaaaaaaaaaaaaaaaaaaaaaaaaaaaaaaaaaaaaaaaaaaaaaaaaaaaaaaaaaaaaaaaaaaaaaaaaaaaaaaaaaaaaaaaaaaaaaaaaaaaaagaatt

SEQ ID NO: 1234 - RNA, 2536 nt, synthetic construct
  misc_feature 1..2536: note = Artificial____RUNX1(1-177)_N_RUNX1T1a(31-604) mRNA opt5
  source 1..2536: mol_type = other RNA
aggagagtcccgcagtcggcgtccagcggctctgcttgttcgtgtgtgtgtcgttgcaggccttattcaagcttaccatgagaatccccgtggacgccagcacctcccggcgcttcacacctccgtctacggctctgagccccggcaagatgtccgaggccctccctctgggggcgcccgatgctggagccgcccttgctggcaaactgagatctggggaccggagcatggtcgaagttctcgccgatcaccctggagagctggtgcgcaccgactcccccaactttctttgctctgtgctgcctacacattggagatgtaataagaccctcccgattgctttcaaagtcgtggccctgggcgatgttcccgacgggacactggtgaccgtcatggcgggaaacgatgaaaattacagcgccgagctccggaacgctacagccgctatgaagaatcaggtggcccgctttaacgacctgagattcgttggccggtccggccgcgggaaatcttttacccttacgatcaccgtgttcacaaatcctccccaagtcgcgacctatcacagagccattaagatcacagtggatggacctcgggaaccccgcaacagaaccgagaagcattctacgatgccggactcccctgtggatgtcaaaacacagagccggctgacaccccctaccatgccccctcccccgaccacccagggcgctccccgcacatcttcctttacgcctaccacactcaccaatgggacaagccactctcccaccgccctgaacggagctccttccccgcccaatggcttcagcaacgggccttcctctagctccagcagctcccttgccaatcagcaactgccccctgcctgcggagctagacagctcagcaagctgaaacggtttctgacgacactccagcagttcggcaacgacatttctcccgagatcggcgaaagagttcgcaccctggtgcttgggctggtgaatagcaccctcacaatcgaggaatttcattccaagctgcaagaggcgaccaacttccctcttcggccctttgtcattccgttcctgaaagccaacctccctctgctgcagagagagctcctgcactgtgctcgccttgccaagcagaatcccgcccagtacctggctcaacacgaacagctcctgcttgatgcctctacaacgagccccgtggactccagcgagctgctcctggacgttaacgaaaatggaaagcggagaacccctgatcgcacaaaagagaacggcttcgaccgggaaccgctgcattctgagcacccctccaagagaccttgcaccatcagccccgggcagcgctattctcctaataacggactctcctaccaacccaatggcctgcctcatcccacaccgcctccccctcagcactatcggcttgatgacatggcgattgctcaccattacagagatagctatcgccacccctcccatcgggacctgagagatcggaaccgcccgatggggctccacggaaccagacaggaggaaatgatcgaccatcggctgacggatagagagtgggccgaagagtggaaacacctggaccaccttctcaattgtattatggatatggtggaaaagacccgccggtctctgacagtcctgagacgctgccaggaggccgacagagaggaactcaactactggatccggcgctacagcgacgctgaggatctgaaaaagggcggcgggtcctctagctcccatagcagacaacagtctcctgtgaatcccgaccctgttgcccttgatgctcaccgggaatttctgcatcgccccgcctccggatatgtgcccgaggaaatttggaaaaaggcggaggaggccgtcaacgaagtgaagagacaggctatgaccgagctccagaaagccgtcagcgaagctgagcggaaggcccacgacatgatcacaaccgagcgcgcgaaaatggaaagaacggtggccgaggctaagcggcaagccgctgaagatgccctggccgttatcaatcagcaggaggactcttccgaaagctgttggaactgcggccgcaaagctagcgagacatgtagcgggtgcaataccgcgagatactgtggatccttctgccagcacaaggattgggagaagcatcaccatatttgcggccaaacactgcaggcccagcagcaaggggacacccctgctgtgtcttcttccgtcaccccgaacagcggcgccggatcccccatggatacacctcccgccgctacgcctcggtctaccacacccggcacccctagcacaatcgaaaccacgccgagatgaggactagtccctgttcccagagcccacttttttttctttttttgaaataaaatagcctgtctttcagatctcaaaggctcttttcagagccaccaaaaaaaaaaaaaaaaaaaaaaaaaaaaaaaaaaaaaaaaaaaaaaaaaaaaaaaaaaaaaaaaaaaaaaaaaaaaaaaaaaaaaaaaaaaaaaaaaaaaagaatt

SEQ ID NO: 1235 - RNA, 1051 nt, synthetic construct
  misc_feature 1..1051: note = Artificial____RUNX1(1-241)_RUNX1T1b(short) mRNA opt5
  source 1..1051: mol_type = other RNA
aggagagtcccgcagtcggcgtccagcggctctgcttgttcgtgtgtgtgtcgttgcaggccttattcaagcttaccatgagaatccccgtggacgccagcacctcccggcgcttcacacctccgtctacggctctgagccccggcaagatgtccgaggccctccctctgggggcgcccgatgctggagccgcccttgctggcaaactgagatctggggaccggagcatggtcgaagttctcgccgatcaccctggagagctggtgcgcaccgactcccccaactttctttgctctgtgctgcctacacattggagatgtaataagaccctcccgattgctttcaaagtcgtggccctgggcgatgttcccgacgggacactggtgaccgtcatggcgggaaacgatgaaaattacagcgccgagctccggaacgctacagccgctatgaagaatcaggtggcccgctttaacgacctgagattcgttggccggtccggccgcgggaaatcttttacccttacgatcaccgtgttcacaaatcctccccaagtcgcgacctatcacagagccattaagatcacagtggatggacctcgggaaccccgcagacatcggcagaagctggacgatcagaccaaaccgggcagcctctcctttagcgagcgcctgtctgagcttgaacagctgagacggacggctatgagagtgtcccctcaccatcccgcccctacacccaacccccgcgctagcctcaatcactctaccgccttcaaccctcaaccgcagtcccagatgcaggaggtcgggttttgccacgttgcccaagtgggactgaagctgctcggctgaggactagtccctgttcccagagcccacttttttttctttttttgaaataaaatagcctgtctttcagatctcaaaggctcttttcagagccaccaaaaaaaaaaaaaaaaaaaaaaaaaaaaaaaaaaaaaaaaaaaaaaaaaaaaaaaaaaaaaaaaaaaaaaaaaaaaaaaaaaaaaaaaaaaaaaaaaaaaagaatt

SEQ ID NO: 1236 - RNA, 2755 nt, synthetic construct
  misc_feature 1..2755: note = Artificial____RUNX1(1-241)_V_RUNX1T1b(22-604) mRNA opt5
  source 1..2755: mol_type = other RNA
aggagagtcccgcagtcggcgtccagcggctctgcttgttcgtgtgtgtgtcgttgcaggccttattcaagcttaccatgagaatccccgtggacgccagcacctcccggcgcttcacacctccgtctacggctctgagccccggcaagatgtccgaggccctccctctgggggcgcccgatgctggagccgcccttgctggcaaactgagatctggggaccggagcatggtcgaagttctcgccgatcaccctggagagctggtgcgcaccgactcccccaactttctttgctctgtgctgcctacacattggagatgtaataagaccctcccgattgctttcaaagtcgtggccctgggcgatgttcccgacgggacactggtgaccgtcatggcgggaaacgatgaaaattacagcgccgagctccggaacgctacagccgctatgaagaatcaggtggcccgctttaacgacctgagattcgttggccggtccggccgcgggaaatcttttacccttacgatcaccgtgttcacaaatcctccccaagtcgcgacctatcacagagccattaagatcacagtggatggacctcgggaaccccgcagacatcggcagaagctggacgatcagaccaaaccgggcagcctctcctttagcgagcgcctgtctgagcttgaacagctgagacggacggctatgagagtgtcccctcaccatcccgcccctacacccaacccccgcgctagcctcaatcactctaccgccttcaaccctcaaccgcagtcccagatgcaggtcgggcccgagaagcgggttcctgccatgcccggaagccctgtggaagtgaaaattcaatccagatctagccctccgacaatgcctcccctgcctcccatcaatcctggcgggccccgcccggtctcctttacccctaccgctctgagcaacggaatcaatcactctcctcccacactcaacggcgcgccctccccgccccagcggttcagcaatggccctgcctctagcacgtcctctgctctgaccaaccagcagcttcccgccacatgcggggccagacaactgagcaagctcaaacgctttctgaccacacttcagcagttcggaaacgacatttcccctgagatcggcgagaaggtgcggaccctggttctcgctctggtgaatagcacggtcacaattgaagagtttcattgtaagctgcaagaagccaccaacttccccctcagacctttcgtgatcccctttctgaaagcgaatcttccgctgctccagcgcgagctgcttcactgcgctcgggccgccaagcagaccccttctcagtacctggctcaacatgaacacctcctgctgaacacatccattgccagccccgctgattcttccgagctcctgatggaggttcacgggaatggaaaaagacctagccccgaacgccgggaggaaaactccttcgacagagacaccatcgccccggagcctcccgcgaagcgggtgtgtacaatttctcctgctccccgccatagccccgcccttacggtccctctgatgaatccgggcgggcagtttcaccccacccctccccctctccagcattatacactggaagatatcgccacctcccacctgtacagagagcccaacaaaatgcttgagcatcgggaagtgagagaccgccaccactctctcggactgaatggcggctatcaggatgagctggtcgaccatcggctcacagaaagagagtgggctgatgaatggaagcacctggaccatgcccttaactgcatcatggagatggtggagaaaacccgcagaagcatggcggttctgcggcgctgtcaagaatccgatagagaggaactcaattactggaagcggcgctataacgagaatacggagctgagaaagaccgggacagaactggtgagccggcagcactctcctggatccgccgacagcctttctaacgattcccagcgcgagttcaatagcagaccgggcaccgggtacgtccccgtggaattttggaaaaagacagaggaagctgttaacaaagtgaagattcaggccatgtctgaggtccaaaaagctgtggccgaggccgaacagaaggctttcgaggtgatcgcgaccgaacgggcccgcatggagcagacgattgctgacgttaagagacaggccgccgaagatgcttttctcgtcatcaacgagcaagaggaaagcacagagaattgctggaactgtggacggaaagcctccgaaacctgcagcggctgtaatattgcgagatactgcgggtctttctgccagcacaaggactgggagcgccatcaccggctgtgtggccagaacctgcatggacaatcccctcacggccaggggagacccctcctgcctgtgggacgcggcagctccgctcggtctgccgactgcagcgtgccctccccggcccttgataaaacatctgctaccaccagcagatcctctacacccgccagcgtcacggcgatcgacaccaatgggctgtgaggactagtccctgttcccagagcccacttttttttctttttttgaaataaaatagcctgtctttcagatctcaaaggctcttttcagagccaccaaaaaaaaaaaaaaaaaaaaaaaaaaaaaaaaaaaaaaaaaaaaaaaaaaaaaaaaaaaaaaaaaaaaaaaaaaaaaaaaaaaaaaaaaaaaaaaaaaaaagaatt

SEQ ID NO: 1237 - RNA, 2755 nt, synthetic construct
  misc_feature 1..2755: note = Artificial____RUNX1(1-241)_I_RUNX1T1b(22-604) mRNA opt5
  source 1..2755: mol_type = other RNA
aggagagtcccgcagtcggcgtccagcggctctgcttgttcgtgtgtgtgtcgttgcaggccttattcaagcttaccatgagaatccccgtggacgccagcacctcccggcgcttcacacctccgtctacggctctgagccccggcaagatgtccgaggccctccctctgggggcgcccgatgctggagccgcccttgctggcaaactgagatctggggaccggagcatggtcgaagttctcgccgatcaccctggagagctggtgcgcaccgactcccccaactttctttgctctgtgctgcctacacattggagatgtaataagaccctcccgattgctttcaaagtcgtggccctgggcgatgttcccgacgggacactggtgaccgtcatggcgggaaacgatgaaaattacagcgccgagctccggaacgctacagccgctatgaagaatcaggtggcccgctttaacgacctgagattcgttggccggtccggccgcgggaaatcttttacccttacgatcaccgtgttcacaaatcctccccaagtcgcgacctatcacagagccattaagatcacagtggatggacctcgggaaccccgcagacatcggcagaagctggacgatcagaccaaaccgggcagcctctcctttagcgagcgcctgtctgagcttgaacagctgagacggacggctatgagagtgtcccctcaccatcccgcccctacacccaacccccgcgctagcctcaatcactctaccgccttcaaccctcaaccgcagtcccagatgcagattgggcccgagaagcgggtccctgccatgcccggaagccctgttgaagtgaaaatccaatccagatctagccctccgacaatgcctcccctgcctcccatcaatcctggcgggccccgcccggtgtcctttacccctaccgctctgagcaacggaattaatcactctcctcccacactcaacggcgcgccctccccgccccagcggttcagcaatggccctgcctctagcacgtcctctgctctgaccaaccagcagcttcccgccacatgcggggccagacaactgagcaagctcaaacgctttctgaccacacttcagcagttcggaaacgacatctcccctgagattggcgagaaggtccggaccctggtgctcgctctggttaatagcacggtgacaatcgaagagtttcattgtaagctgcaagaagccaccaacttccccctcagacctttcgtcattccctttctgaaagcgaatcttccgctgctccagcgcgagctgcttcactgcgctcgggccgccaagcagaccccttctcagtacctggctcaacatgaacacctcctgctgaacacatccatcgccagccccgctgattcttccgagctcctgatggaggtgcacgggaatggaaaaagacctagccccgaacgccgggaggaaaactccttcgacagagacaccattgccccggagcctcccgcgaagcgggtttgtacaatctctcctgctccccgccatagccccgcccttacggtgcctctgatgaatccgggcgggcagtttcaccccacccctccccctctccagcattatacactggaagatatcgccacctcccacctgtacagagagcccaacaaaatgcttgagcatcgggaagtcagagaccgccaccactctctcggactgaatggcggctatcaggatgagctggtggaccatcggctcacagaaagagagtgggctgatgaatggaagcacctggaccatgcccttaactgcattatggagatggtcgagaaaacccgcagaagcatggcggtgctgcggcgctgtcaagaatccgatagagaggaactcaattactggaagcggcgctataacgagaatacggagctgagaaagaccgggacagaactggttagccggcagcactctcctggatccgccgacagcctttctaacgattcccagcgcgagttcaatagcagaccgggcaccgggtacgtgcccgtcgaattttggaaaaagacagaggaagctgtgaacaaagttaagatccaggccatgtctgaggtgcaaaaagctgtcgccgaggccgaacagaaggctttcgaggtgattgcgaccgaacgggcccgcatggagcagacgatcgctgacgtgaagagacaggccgccgaagatgcttttctcgttattaacgagcaagaggaaagcacagagaattgctggaactgtggacggaaagcctccgaaacctgcagcggctgtaatatcgcgagatactgcgggtctttctgccagcacaaggactgggagcgccatcaccggctgtgtggccagaacctgcatggacaatcccctcacggccaggggagacccctcctgcctgtcggacgcggcagctccgctcggtctgccgactgcagcgtgccctccccggcccttgataaaacatctgctaccaccagcagatcctctacacccgccagcgtgacggcgatcgacaccaatgggctgtgaggactagtccctgttcccagagcccacttttttttctttttttgaaataaaatagcctgtctttcagatctcaaaggctcttttcagagccaccaaaaaaaaaaaaaaaaaaaaaaaaaaaaaaaaaaaaaaaaaaaaaaaaaaaaaaaaaaaaaaaaaaaaaaaaaaaaaaaaaaaaaaaaaaaaaaaaaaaaagaatt

SEQ ID NO: 1238 - RNA, 1639 nt, synthetic construct
  misc_feature 1..1639: note = Homo sapiens__Q01196-1__RUNX1(K83E_R174Q) mRNA opt11
  source 1..1639: mol_type = other RNA
aggagagtcccgcagtcggcgtccagcggctctgcttgttcgtgtgtgtgtcgttgcaggccttattcaagcttaccatgcgcatcccagtagacgcctcaacctcacgtcgcttcacccctccctcaacagccctctcacccggcaaaatgtccgaagcattacccctcggtgcccccgacgcaggcgcagcactcgccggcaaacttcgatctggcgaccgatccatggtcgaagtcctagccgaccaccccggcgaactcgtacgaacagactcacccaatttcctctgctccgtcctccccactcactggcgctgcaacgaaaccctgcccattgccttcaaagtcgtcgcacttggcgacgtcccagacggcaccctagtaacagtaatggccggaaacgacgaaaactactcagcagaactacgcaacgccaccgccgccatgaaaaaccaagtagcccgcttcaacgatctacgattcgtcggccgatccggacgtggcaaatccttcactcttacaatcacagtcttcacaaatcccccacaagtcgccacctaccaccgcgccatcaaaattaccgttgacggcccccaagaaccaagacgccatcgtcaaaaacttgacgaccaaaccaaacccggctcactatcattctccgaacgcctctccgaactcgaacaactccgccgcaccgccatgcgcgtctcaccccaccaccccgctcccacaccaaaccccagggcctcccttaaccactccaccgcattcaacccccaaccacaatcccaaatgcaagacacacgacaaatacaaccatccccaccgtggtcatacgaccaatcttaccaatacctcggttctatagcctccccatccgtccacccagccacacccatctcccccggccgcgcatccggaatgaccacactctcagccgaactctcctcccgcctatcaaccgcccctgacctcaccgccttttccgacccccgacaattccccgcactaccgtcaatctccgacccccgaatgcactatcccggcgccttcacctactcccccacacctgtaacctccggcatcggcatcggcatgtccgccatgggaagcgccaccagatatcatacttacctacccccaccttatccaggatcctcacaagcccaaggcggcccttttcaagcctcctccccctcctaccatctctactacggcgcctccgccggctcctaccaattctccatggtcggcggcgaacgatcaccaccccgaatcctccctccctgcaccaacgcatcgaccggatcggccctcttaaacccctccctccccaaccaatcagacgtcgtcgaagccgaaggatctcactccaactcccccacaaacatggcaccttcagcccgcctcgaagaagccgtctggcgcccctactaaggactagtccctgttcccagagcccacttttttttctttttttgaaataaaatagcctgtctttcagatctcaaaggctcttttcagagccaccaaaaaaaaaaaaaaaaaaaaaaaaaaaaaaaaaaaaaaaaaaaaaaaaaaaaaaaaaaaaaaaaaaaaaaaaaaaaaaaaaaaaaaaaaaaaaaaaaaaaagaatt

SEQ ID NO: 1239 - RNA, 2113 nt, synthetic construct
  misc_feature 1..2113: note = Homo sapiens____CBFbeta(1-165)_SMMHC(1527-1972) mRNA opt11
  source 1..2113: mol_type = other RNA
aggagagtcccgcagtcggcgtccagcggctctgcttgttcgtgtgtgtgtcgttgcaggccttattcaagcttaccatgccaagggtggtgcccgaccagagaagcaagttcgaaaatgaggaatttttccggaagctgagcagggaatgcgagataaaatacacgggcttccgagacagaccacacgaagagaggcaagcgaggttccaaaacgcctgcagagacggaagaagcgagatagcgttcgtggccacggggacgaacctgagcctacagttcttccctgcaagctggcaaggagaacagaggcagacaccgagtagggagtacgtggacctggagagggaggcggggaaggtgtacctgaaggcaccaatgatactaaatggagtatgtgtaatctggaagggatggatagacctgcaacggctggacgggatgggatgcctggagttcgacgaggaaagagcgcagcaagaggacgcgctggcacaacaggcgttcgaggaagcaaggaggcggacgcgagagttcgaggacagggataggagccacagagaggagatggaggtacacgagctagagaaaagcaagagggcgctggaaacacaaatggaggagatgaagacacagctggaggagttggaagacgaactgcaagcgacagaggacgcaaagctgaggctggaagtcaacatgcaggcattaaagggacagttcgagagagacctgcaggcaagagacgagcagaacgaggaaaagaggaggcagctccaaaggcagctgcacgagtacgaaacggaactggaggacgagcgaaagcagagggcgctagcagcagcagcaaagaaaaagctggagggggacctgaaggacctggagttgcaggcagacagcgcaataaaagggagggaagaggcgatcaagcaactaagaaagctgcaggcacaaatgaaggatttccagagagagctagaggatgcaagggcaagccgggacgagatattcgcgacggcaaaagaaaacgagaaaaaggcgaaaagcctagaagcagacctgatgcagctacaggaggatttggcggcggcggagagggcaaggaaacaggcagatctggagaaggaggagctggcggaagagttggcaagtagcctaagcggaaggaatgcgctgcaggacgaaaagcggagactcgaggcgagaatagcacagctagaggaggaactggaggaggagcagggaaacatggaagcgatgagcgacagagtgagaaaggcgacgcaacaggcggaacagctaagcaacgagttagcaacggagagaagtacagcccaaaagaatgaaagtgcaaggcaacagctagagaggcagaacaaggaactgaggagcaagctgcacgagatggaaggagcagtgaaaagcaaattcaaaagcaccatcgcggcgctggaagcgaagatagcgcagctggaggagcaggtagaacaagaggcaagagagaagcaagcggcgacaaagagtctaaagcagaaagacaagaaactgaaagagatactgttacaagtggaggacgaaaggaagatggcagagcaatacaaggagcaggcggaaaaggggaacgcgagggtgaaacagttaaagaggcaactggaggaggcggaggaagagagccaaagaataaacgccaacagaaggaaactacagcgggaattggacgaggcaacagagagtaacgaagccatggggcgagaagtgaacgcactaaagagcaaactgaggcgggggaacgagacgagtttcgtaccgagcaggcggagcggagggagaagggtgatagagaatgcagacggcagcgaagaggaaacggacacgagagacgcagacttcaacgggacgaaggcgagcgaatagggactagtccctgttcccagagcccacttttttttctttttttgaaataaaatagcctgtctttcagatctcaaaggctcttttcagagccaccaaaaaaaaaaaaaaaaaaaaaaaaaaaaaaaaaaaaaaaaaaaaaaaaaaaaaaaaaaaaaaaaaaaaaaaaaaaaaaaaaaaaaaaaaaaaaaaaaaaaagaatt

SEQ ID NO: 1240 - RNA, 1828 nt, synthetic construct
  misc_feature 1..1828: note = Artificial____CBFbeta(1-165)_SMMHC(1527-1877) mRNA opt11
  source 1..1828: mol_type = other RNA
aggagagtcccgcagtcggcgtccagcggctctgcttgttcgtgtgtgtgtcgttgcaggccttattcaagcttaccatgccgagggtggtgccagaccaaaggagcaagttcgagaacgaggaatttttcagaaagctgagcagagagtgcgagataaagtacacggggtttagagacagaccacacgaggagaggcaggcaaggttccagaacgcatgcagagacgggagaagcgagatagcattcgtagcgacaggaacaaacctaagcctacaatttttcccggcgagctggcagggagagcagagacagacgccaagcagggagtacgtggacctagagagggaagcaggaaaggtgtacctaaaggcaccaatgatactaaatggggtgtgcgtaatatggaaggggtggatagacctacagagactggacgggatgggatgcttggagttcgacgaagagagagcgcaacaggaggacgcactggcacaacaagcattcgaagaggcaaggaggaggacgagagagttcgaggacagagacaggagtcacagggaggaaatggaggtacacgaactagagaaaagcaagagggcgctggagacacagatggaagagatgaaaacgcaactggaggagctggaagacgagctgcaggcaacagaagatgcgaagctaaggctggaggtgaacatgcaggcactgaaaggacagttcgaaagggacctgcaggcgagggacgaacagaacgaggaaaagaggaggcagctccagaggcagctacacgagtacgagacggagttggaagacgagagaaagcaaagagcactagcggcggcggcgaagaaaaagctagagggagacctcaaagatctggagctacaggcagacagcgcgataaagggcagggaggaagcgataaagcagctaaggaagctgcaggcacagatgaaggacttccagagggagctcgaggacgcaagagcgagccgggacgagatattcgccacggcaaaggagaacgaaaagaaggcgaaaagcctggaggcggacctaatgcaactgcaagaagacctggcagcggcagagcgagcgaggaagcaggcagacctagagaaggaggagctggcggaagaactggcgagtagcctgagcggaaggaacgcactgcaggacgagaagaggaggctagaggcaagaatagcgcagctggaggaggagttggaggaggagcaggggaacatggaggcgatgagcgacagagtgagaaaggcgacacagcaagcagagcagttaagcaacgagctggcaacagagagaagcacggcgcaaaagaacgaatcagcgaggcaacagttggagaggcagaacaaggaactaagaagcaagctgcacgagatggagggcgcggtaaagagcaaattcaagtcaacaatagcggcgcttgaggcaaagatagcacagctggaagaacaagtagaacaggaggcgagagagaaacaagcagcgacaaagagcctgaaacagaaggacaagaagttaaaggagatactgctacaggtagaggacgaaagaaaaatggcggaacagtacaaagagcaggcagaaaaggggaacgcataaggactagtccctgttcccagagcccacttttttttctttttttgaaataaaatagcctgtctttcagatctcaaaggctcttttcagagccaccaaaaaaaaaaaaaaaaaaaaaaaaaaaaaaaaaaaaaaaaaaaaaaaaaaaaaaaaaaaaaaaaaaaaaaaaaaaaaaaaaaaaaaaaaaaaaaaaaaaaagaatt

SEQ ID NO: 1241 - RNA, 889 nt, synthetic construct
  misc_feature 1..889: note = Artificial____CBFbeta(1-165)_Linker_Lifeact mRNA opt11
  source 1..889: mol_type = other RNA
aggagagtcccgcagtcggcgtccagcggctctgcttgttcgtgtgtgtgtcgttgcaggccttattcaagcttaccatgccgcgcgtggtcccggaccagcgctcgaaatttgaaaatgaagagttctttcgcaagctctcgcgagagtgcgagataaagtacacgggctttcgcgatagaccgcacgaggaaaggcaagcgcgctttcaaaatgcctgtagagatggcaggagcgagatcgcgttcgtggccacgggcacgaacttgagcctgcaatttttcccggcctcgtggcagggcgagcagaggcaaacgccctcgcgcgagtacgtggacttggaaagggaagcgggcaaggtgtatctaaaggccccgatgatactaaatggagtgtgcgtgatctggaaagggtggatagacctgcaaaggctcgatggaatgggctgtctagagttcgatgaggaacgcgcgcaacaggaagacgcattggcacagcaagcgttcgaggaagcacgcaggagaacgcgcgagttcgaggacagggacaggagccatcgcgaggaaatggaagggggctcgggagggagcgggggctctggcgggagcgggggaggaggcgtggccgatctcatcaaaaagttcgagagcataagcaaagaagagggcgatcccccggtagcgacatagggactagtccctgttcccagagcccacttttttttctttttttgaaataaaatagcctgtctttcagatctcaaaggctcttttcagagccaccaaaaaaaaaaaaaaaaaaaaaaaaaaaaaaaaaaaaaaaaaaaaaaaaaaaaaaaaaaaaaaaaaaaaaaaaaaaaaaaaaaaaaaaaaaaaaaaaaaaaagaatt

SEQ ID NO: 1242 - RNA, 856 nt, synthetic construct
  misc_feature 1..856: note = Artificial____CBFbeta(1-165)_HIF1alpha(549-575) mRNA opt11
  source 1..856: mol_type = other RNA
aggagagtcccgcagtcggcgtccagcggctctgcttgttcgtgtgtgtgtcgttgcaggccttattcaagcttaccatgccgcgcgtggtcccggaccagcgctcgaaatttgaaaatgaagagttctttcgaaagctctcgcgcgagtgcgagatcaaatacacgggcttccgcgatcgcccgcacgaggaaaggcaagcgcgctttcaaaatgcctgtcgcgatggcaggagcgagatcgcgttcgtggccacgggcacgaacctgagcctgcaatttttcccggcctcgtggcagggcgagcaaaggcaaacgccctcgcgcgagtacgtggacttggaaagggaagcgggcaaggtctatctcaaggccccgatgatactcaatggcgtgtgcgtgatctggaaagggtggatagacttgcaaaggctcgatggcatgggctgtctcgagttcgacgaggaacgcgcgcaacaggaagatgccctggcccagcaagcgttcgaggaagcgcgcaggcgcacgcgcgagttcgaggacagagacaggagccaccgagaggaaatggaaccgttctcgacccaggacacggacctggacttggaaatgctcgcgccctatatcccgatggatgacgatttccagctcaggtaaggactagtccctgttcccagagcccacttttttttctttttttgaaataaaatagcctgtctttcagatctcaaaggctcttttcagagccaccaaaaaaaaaaaaaaaaaaaaaaaaaaaaaaaaaaaaaaaaaaaaaaaaaaaaaaaaaaaaaaaaaaaaaaaaaaaaaaaaaaaaaaaaaaaaaaaaaaaaagaatt

SEQ ID NO: 1243 - RNA, 901 nt, synthetic construct
  misc_feature 1..901: note Artificial____CBFbeta(1-165)_Linker_HIF1alpha(549-575) mRNA opt11
  source 1..901: mol_type = other RNA
aggagagtcccgcagtcggcgtccagcggctctgcttgttcgtgtgtgtgtcgttgcaggccttattcaagcttaccatgccgcgcgtggtcccggaccagcgctcgaaatttgaaaatgaagagttctttcgaaagctatcgcgagagtgcgagatcaagtacacgggattccgcgatcgaccgcacgaggaaagacaagcgcgatttcaaaatgcatgtcgcgatggcaggagcgagatagcgttcgtggccacgggcacaaacttgagcttgcaattcttcccggcatcatggcagggcgagcaaaggcaaacaccctcgcgcgagtacgtggacttggaaagggaagcgggcaaggtctacctaaaggccccgatgatactcaatggagtgtgcgtgatctggaaagggtggatagacttacaaaggctcgatggcatgggatgtctcgagttcgatgaggaacgcgcgcaacaggaagatgccttggcacagcaagcgttcgaggaagcgcgcaggcgaacgcgcgagttcgaagacagagacaggagccatcgagaggaaatggaaggaggatcgggcggaagcgggggctcgggcgggagcgggggcggaccatttagcacgcaagataccgatctagatctcgagatgttggccccgtacatacccatggacgatgactttcaattgcgctagggactagtccctgttcccagagcccacttttttttctttttttgaaataaaatagcctgtctttcagatctcaaaggctcttttcagagccaccaaaaaaaaaaaaaaaaaaaaaaaaaaaaaaaaaaaaaaaaaaaaaaaaaaaaaaaaaaaaaaaaaaaaaaaaaaaaaaaaaaaaaaaaaaaaaaaaaaaaagaatt

SEQ ID NO: 1244 - RNA, 2536 nt, synthetic construct
  misc_feature 1..2536: note = Artificial____RUNX1(1-177)_N_RUNX1T1a(31-604) mRNA opt11
  source 1..2536: mol_type = other RNA
aggagagtcccgcagtcggcgtccagcggctctgcttgttcgtgtgtgtgtcgttgcaggccttattcaagcttaccatgcgcataccagtagatgcctccacctctcgccgcttcacacctccctcgacagccctcagccccggaaaaatgtccgaagcgctcccacttggcgcacccgacgcaggcgctgccctcgccggaaaactccgtagtggtgaccgctctatggtggaagtcttagccgaccaccccggagaactcgtaagaacagactccccaaacttcctctgctccgtgctacctacacactggcgctgcaacaaaaccctcccgattgccttcaaagtcgtagccctaggcgacgtccccgacggaaccctcgtcaccgtcatggcaggcaatgatgaaaactactccgcagaactccgcaacgccaccgctgcaatgaaaaaccaagtcgcacgattcaatgacctcagattcgtagggcgctccggccgagggaaatcattcaccctcacaatcacagtcttcaccaaccctccacaagtcgcaacataccaccgcgccatcaaaatcacagtcgacggaccccgagaaccccgcaatagaactgagaaacacagcaccatgcccgattcgccagtcgatgtcaaaacccaatcaaggctcaccccgcccacaatgcccccacccccaaccacacagggcgcaccccgcacctcttcattcacccctacaacactaacaaatggcacatcccacagtccaaccgcccttaatggcgccccatccccaccaaacggtttctccaacggcccctcctcttcatcatcatcctccctggctaaccaacaactcccacccgcatgcggagcacgacaactcagcaaactaaaacgattcctcaccactcttcaacaattcggcaacgacatatccccagaaataggcgaacgagtccgaaccctagtcctcggtctagtcaattccacgctcactatagaggagttccactccaaactacaagaagctaccaacttcccactccgaccattcgtcattccattcctcaaggcaaacctccctctgctccaacgtgaactcctacactgcgccagactcgccaagcaaaaccccgcacaatatcttgcccaacacgaacaacttctcttagacgcctccaccacatctcccgtcgactcatctgaacttctcctagatgttaacgaaaacggcaaacgcagaactcccgaccgcaccaaagaaaacgggttcgatagagaaccactacacagcgaacacccctctaaacgcccatgcaccatatctcctggccaacggtactcacctaacaacggtctctcataccaacccaatggcctcccacaccccaccccaccacccccacaacactaccgacttgacgacatggcgatcgcacaccactacagagactcttataggcacccatcccaccgcgatctccgcgaccgcaatcgccccatgggactacacggcactcgccaagaagaaatgatcgaccaccgactaaccgaccgtgaatgggcagaagaatggaaacacctcgaccacctcctaaattgcatcatggacatggtcgagaaaacaaggcgctcactcacggttctccgtcgctgccaagaagcagatcgtgaagaactgaactattggattcgacgatactcagacgccgaagacctcaagaaaggcggaggctcatctagctcccatagtcgccaacaatcacccgtaaacccggacccagtagccctcgacgctcaccgagagttcctacaccgtcccgcctccggatacgtacccgaagaaatatggaagaaagctgaagaagcagtaaacgaagtcaaacgccaagctatgaccgaactacaaaaagccgtaagcgaagctgaacgcaaagcacacgacatgatcactaccgaacgcgcaaaaatggaacgaaccgtcgcagaagccaaacgccaggccgccgaagacgcccttgctgtcataaatcagcaagaagactcctccgaatcctgctggaactgtggccgcaaagccagcgaaacctgctccggttgcaataccgcccgctactgcggttcattctgccagcacaaagactgggaaaaacaccaccacatctgcggtcaaaccctgcaagctcaacaacaaggcgacacccctgccgtctcatccagcgtaacccccaacagcggcgccggctccccaatggacaccccacccgcagccacaccccgatcaacaacacccggaacaccctcgactatcgaaaccacaccccgttagggactagtccctgttcccagagcccacttttttttctttttttgaaataaaatagcctgtctttcagatctcaaaggctcttttcagagccaccaaaaaaaaaaaaaaaaaaaaaaaaaaaaaaaaaaaaaaaaaaaaaaaaaaaaaaaaaaaaaaaaaaaaaaaaaaaaaaaaaaaaaaaaaaaaaaaaaaaaagaatt

SEQ ID NO: 1245 - RNA, 1051 nt, synthetic construct
  misc_feature 1..1051: note = Artificial____RUNX1(1-241)_RUNX1T1b(short) mRNA opt11
  source 1..1051: mol_type = other RNA
aggagagtcccgcagtcggcgtccagcggctctgcttgttcgtgtgtgtgtcgttgcaggccttattcaagcttaccatgcgcatcccagtcgacgcctccacctcccgccgcttcaccccaccctcaacagcactctcacccggcaaaatgtcagaagcactccctctcggagcacccgacgccggcgccgccctcgccggcaaactccgctcaggcgaccgatcaatggtcgaagtcctagccgaccaccccggagaactcgtccgcaccgactcacccaacttcctctgctccgtcctacccacccactggcgctgcaacaaaaccctccccatcgccttcaaagtcgtcgcactaggcgacgtcccagacggcaccctcgtcaccgtcatggccggcaacgacgaaaactactccgccgaactccgcaacgccacagcagccatgaaaaaccaagtcgcccgcttcaacgacctccgcttcgtaggccgctccggccgcggcaaatccttcaccctaaccatcacagtattcaccaatccaccccaagtcgccacctaccaccgcgctatcaaaatcaccgtcgacggcccccgcgaaccccgccgccaccgacaaaaactcgacgaccaaaccaaacccggctcactctccttctccgaacgcctctccgaactcgaacaactccgccgaacagccatgcgcgtctcaccccaccaccccgcccccacccccaacccccgagcctccctcaaccactcaaccgccttcaacccccaaccacaatcccaaatgcaagaagtcggcttctgccacgtagcccaagtcggtctcaaactcctcggctaaggactagtccctgttcccagagcccacttttttttctttttttgaaataaaatagcctgtctttcagatctcaaaggctcttttcagagccaccaaaaaaaaaaaaaaaaaaaaaaaaaaaaaaaaaaaaaaaaaaaaaaaaaaaaaaaaaaaaaaaaaaaaaaaaaaaaaaaaaaaaaaaaaaaaaaaaaaaaagaatt

SEQ ID NO: 1246 - RNA, 2755 nt, synthetic construct
  misc_feature 1..2755: note = Artificial____RUNX1(1-241)_V_RUNX1T1b(22-604) mRNA opt11
  source 1..2755: mol_type = other RNA
aggagagtcccgcagtcggcgtccagcggctctgcttgttcgtgtgtgtgtcgttgcaggccttattcaagcttaccatgcgcatccccgtggacgcctcaacaagccgacgcttcacgcccccatccaccgccctatcccccggcaaaatgtcagaagccctccccctcggagccccagacgcaggggccgcactcgcaggcaaacttcgatccggggacaggagcatggtcgaagtcctagccgaccaccccggagagctagtccgaaccgactcccccaacttcctgtgctccgtactgccaacccactggcgatgtaacaaaacactccctatagcttttaaagtagtggccctaggagacgttccagacggcaccctcgtcaccgtcatggccggcaacgacgaaaactacagcgccgaactacgcaacgcaactgccgccatgaaaaatcaagtggccagattcaacgacctccgcttcgtcggccgcagcggaagaggaaaatcgttcaccttaaccatcacagttttcacaaacccaccccaggttgcaacatatcaccgagccatcaaaatcactgttgacggcccacgtgaaccaagacggcatcgtcaaaaactagacgaccaaacaaaaccaggttcactctcattttcagaacgcctctcagaactcgaacaactacgacgaaccgctatgcgcgtctcaccccaccaccccgccccgaccccgaacccacgagcatctctgaaccacagcacagccttcaacccacaaccacagtcccaaatgcaagttggacccgagaaacgagtcccagctatgccgggcagccccgtcgaggtcaaaatccaatcgcgcagcagccctcccacaatgcccccactaccacccatcaacccaggcggtccccgccccgtctcattcaccccaacagccctctcaaatggaatcaaccacagccctcccaccctcaacggtgccccctccccaccacaacgcttttcaaacggaccagcgtcctccacctccagcgctctcactaaccaacaactcccagcaacttgcggagccagacaactcagcaaactaaaaagattcctcaccaccctacaacagttcggaaacgacatctcccccgaaataggcgagaaagttcgcactcttgtactagcccttgtaaactccacagtaactatcgaagagttccactgcaaactacaagaagcaaccaacttcccactccgccccttcgtgatcccattcctaaaagcaaacctaccactactccaacgcgaactgctccactgcgcccgtgccgcaaaacagactccctcacaatacctcgcccaacatgaacatcttctcctcaacacatcaattgctagcccagcagactcatccgaacttctcatggaagtccacggaaacggtaaacgaccatctcccgaacgacgcgaagaaaactccttcgaccgcgacaccatcgcccccgaaccacccgccaaacgcgtatgcacaatatcaccggccccgcgccactcccctgcacttaccgtaccccttatgaacccagggggccaattccaccctacacccccacccctgcagcactacactctagaagacattgcaacaagccacctataccgagaacctaacaaaatgctagaacacagagaagtgcgtgaccgccaccacagcctcggcttaaacgggggctaccaagacgaactcgttgatcaccgcctcaccgaacgagagtgggcagatgaatggaaacacctggaccacgccctaaactgcatcatggaaatggtcgagaaaaccagacgatcaatggccgtcctaagaaggtgccaagaatcagacagagaagaactcaactattggaaacgacgatataacgaaaacaccgaactcagaaaaacaggcactgaactcgtctcgagacaacactcaccaggctctgcagactctctttccaacgactcacaacgcgagttcaatagccgaccaggcaccggctacgtccccgtcgaattttggaagaaaaccgaagaagccgtaaacaaagtcaaaatacaagcaatgtccgaagtccaaaaagccgtcgccgaagcagaacaaaaagccttcgaggttatcgcgaccgaacgcgcccgtatggaacagacaatagccgacgtcaaacgacaggctgccgaagacgctttcctcgttatcaacgaacaagaagaatcaactgaaaactgctggaactgcggccggaaagcgtccgaaacctgctcaggctgcaacatcgctcgttattgcggctccttttgccaacataaagactgggagcgccaccaccgcctatgcggccaaaacctacacggccaaagcccccacggacaaggccgacctctcctacccgtaggccgaggctcctccgcacgctccgccgactgcagcgtccccagccccgcactcgacaaaacttcggcaaccacatcccgcagcagcacccccgcgagcgttacagccatcgacacaaacggactataaggactagtccctgttcccagagcccacttttttttctttttttgaaataaaatagcctgtctttcagatctcaaaggctcttttcagagccaccaaaaaaaaaaaaaaaaaaaaaaaaaaaaaaaaaaaaaaaaaaaaaaaaaaaaaaaaaaaaaaaaaaaaaaaaaaaaaaaaaaaaaaaaaaaaaaaaaaaaagaatt

SEQ ID NO: 1247 - RNA, 2755 nt, synthetic construct
  misc_feature 1..2755: note = Artificial____RUNX1(1-241)_I_RUNX1T1b(22-604) mRNA opt11
  source 1..2755: mol_type = other RNA
aggagagtcccgcagtcggcgtccagcggctctgcttgttcgtgtgtgtgtcgttgcaggccttattcaagcttaccatgaggatacccgtcgacgcctccacgtcacgccgcttcacacccccaagcaccgccctatcacccggcaaaatgtccgaagctctaccactaggtgcgccagacgcaggcgctgctctcgccggaaaactacgatccggggaccgatccatggtcgaagtcctcgctgatcaccccggcgaacttgtccgcacagactccccaaacttcctctgctccgtactcccgactcactggcgttgcaacaaaacacttcctattgcgttcaaggtcgtagccctaggggacgtccccgacggcaccttagtcacagtcatggcgggtaacgacgagaactactcagccgaattacgcaacgctacagcagccatgaaaaaccaggtagctcgcttcaacgacctccggttcgtcggtagaagcggccgaggaaaatcttttaccctcacaatcaccgtgttcaccaacccaccccaagtcgccacctaccaccgggcaatcaaaatcacagttgacggaccccgcgagccccgacgccatcgccaaaaacttgacgaccaaaccaaaccaggatcactatccttctcagagcgactctcagaactcgaacaattacgccggaccgcaatgcgtgtctcaccccaccacccggcccccacgcccaacccccgcgcctcactcaaccactccactgctttcaacccgcaaccccaatcccaaatgcagatcggcccagaaaaacgcgttcccgccatgccaggaagtcccgtcgaagtcaaaatccaatccagatcttccccaccaaccatgcctcccctcccgcccataaacccgggaggtccccgacccgtgtccttcacccccaccgccctctcgaacggcatcaaccactcaccacctaccctaaacggagcaccatccccaccccaacgcttctcaaacggacctgcatcctccacatcgtccgccctcaccaaccaacaactcccagccacatgcggcgcccgtcaactatctaagctaaaacgcttcctaaccactctccagcaatttggcaacgacatatcccccgaaatcggcgaaaaagtccgcacactcgtcttagccctcgtcaattccaccgtcaccatagaagagttccactgcaaactccaagaagccacaaacttcccactccgtccctttgtcatcccattcttaaaggcgaacctaccactactccaaagagaactactccactgcgctcgggccgcaaaacaaacccctagccagtacctagcccaacacgaacatctactactcaacactagcatcgcctcacccgcagactcatctgaactacttatggaagtccacggcaacggcaaacgcccctccccagaaaggcgcgaagaaaactccttcgatcgagacacaatagcacccgaaccacccgccaaacgcgtatgcaccatcagcccagcaccccgacactccccagccctcacggtccctctaatgaacccgggcggacaattccaccccaccccaccacccctacaacactacacattagaagacatagccacatctcacctctaccgcgaacccaataaaatgctggaacaccgcgaagtccgagatagacaccattctctaggactaaatggaggctaccaagacgaacttgtcgaccacagactcacagaacgcgaatgggccgacgaatggaagcacctcgatcatgcccttaactgtatcatggagatggtagagaaaacaagacgatccatggcagttctacgtcgatgccaagagagcgaccgcgaagaactcaactactggaaacgccgctacaacgaaaacacagaactacgaaaaaccggcaccgaactcgtctcccgtcagcactccccgggaagcgccgactcccttagcaacgactcacaacgcgagttcaactctcgccccggaacaggctacgttcctgtcgagttctggaagaaaactgaagaagccgtaaacaaagtcaaaatccaagccatgtcagaagtccaaaaagccgtagcagaagccgaacaaaaggctttcgaagtaattgcaaccgaacgcgcacgtatggaacaaaccatagcagatgtaaaaagacaagccgccgaagacgccttcctcgtcataaacgaacaagaagaatccaccgaaaactgttggaactgcggccgtaaagcctccgaaacatgttctggctgcaacattgcccgttactgtgggtccttctgccaacacaaagattgggaacgccaccaccgcctctgcggacaaaacctccacggccaaagcccccatggtcaaggtagaccactactacccgttggacgcggctccagcgcacgatcagccgactgctcagtgccatcccccgcccttgacaaaacctccgccacaacctcgcgatcatccacaccagcctcagtaacagccatagacaccaacgggctttgaggactagtccctgttcccagagcccacttttttttctttttttgaaataaaatagcctgtctttcagatctcaaaggctcttttcagagccaccaaaaaaaaaaaaaaaaaaaaaaaaaaaaaaaaaaaaaaaaaaaaaaaaaaaaaaaaaaaaaaaaaaaaaaaaaaaaaaaaaaaaaaaaaaaaaaaaaaaaagaatt

SEQ ID NO: 1248 - RNA, 1645 nt, synthetic construct
  misc_feature 1..1645: note = Homo sapiens__Q01196-1__RUNX1(K83E_R174Q) mRNA wt
  source 1..1645: mol_type = other RNA
aggagagtcccgcagtcggcgtccagcggctctgcttgttcgtgtgtgtgtcgttgcaggccttattcaagcttaccatgcgtatccccgtagatgccagcacgagccgccgcttcacgccgccttccaccgcgctgagcccaggcaagatgagcgaggcgttgccgctgggcgccccggacgccggcgctgccctggccggcaagctgaggagcggcgaccgcagcatggtggaggtgctggccgaccacccgggcgagctggtgcgcaccgacagccccaacttcctctgctccgtgctgcctacgcactggcgctgcaacgagaccctgcccatcgctttcaaggtggtggccctaggggatgttccagatggcactctggtcactgtgatggctggcaatgatgaaaactactcggctgagctgagaaatgctaccgcagccatgaagaaccaggttgcaagatttaatgacctcaggtttgtcggtcgaagtggaagagggaaaagcttcactctgaccatcactgtcttcacaaacccaccgcaagtcgccacctaccacagagccatcaaaatcacagtggatgggccccaggaacctcgaagacatcggcagaaactagatgatcagaccaagcccgggagcttgtccttttccgagcggctcagtgaactggagcagctgcggcgcacagccatgagggtcagcccacaccacccagcccccacgcccaaccctcgtgcctccctgaaccactccactgcctttaaccctcagcctcagagtcagatgcaggatacaaggcagatccaaccatccccaccgtggtcctacgatcagtcctaccaatacctgggatccattgcctctccttctgtgcacccagcaacgcccatttcacctggacgtgccagcggcatgacaaccctctctgcagaactttccagtcgactctcaacggcacccgacctgacagcgttcagcgacccgcgccagttccccgcgctgccctccatctccgacccccgcatgcactatccaggcgccttcacctactccccgacgccggtcacctcgggcatcggcatcggcatgtcggccatgggctcggccacgcgctaccacacctacctgccgccgccctaccccggctcgtcgcaagcgcagggaggcccgttccaagccagctcgccctcctaccacctgtactacggcgcctcggccggctcctaccagttctccatggtgggcggcgagcgctcgccgccgcgcatcctgccgccctgcaccaacgcctccaccggctccgcgctgctcaaccccagcctcccgaaccagagcgacgtggtggaggccgagggcagccacagcaactcccccaccaacatggcgccctccgcgcgcctggaggaggccgtgtggaggccctactgatgatgaggactagtccctgttcccagagcccacttttttttctttttttgaaataaaatagcctgtctttcagatctcaaaggctcttttcagagccaccaaaaaaaaaaaaaaaaaaaaaaaaaaaaaaaaaaaaaaaaaaaaaaaaaaaaaaaaaaaaaaaaaaaaaaaaaaaaaaaaaaaaaaaaaaaaaaaaaaaaagaatt

SEQ ID NO: 1249 - RNA, 2119 nt, synthetic construct
  misc_feature 1..2119: note = Homo sapiens____CBFbeta(1-165)_SMMHC(1527-1972) mRNA wt
  source 1..2119: mol_type = other RNA
aggagagtcccgcagtcggcgtccagcggctctgcttgttcgtgtgtgtgtcgttgcaggccttattcaagcttaccatgccgcgcgtcgtgcccgaccagagaagcaagttcgagaacgaggagttttttaggaagctgagccgcgagtgtgagattaagtacacgggcttcagggaccggccccacgaggaacgccaggcacgcttccagaacgcctgccgcgacggccgctcggaaatcgcttttgtggccacaggaaccaatctgtctctccagttttttccggccagctggcagggagaacagcgacaaacacctagccgagagtatgtcgacttagaaagagaagcaggcaaggtatatttgaaggctcccatgattctgaatggagtctgtgttatctggaaaggctggattgatctccaaagactggatggtatgggctgtctggagtttgatgaggagcgagcccagcaggaggatgcattagcacaacaggcctttgaagaggctcggagaaggacacgcgaatttgaagatagagacaggtctcatcgggaggaaatggaggtccatgagctggagaagtccaagcgggccctggagacccagatggaggagatgaagacgcagctggaagagctggaggacgagctgcaagccacggaggacgccaaactgcggctggaagtcaacatgcaggcgctcaagggccagttcgaaagggatctccaagcccgggacgagcagaatgaggagaagaggaggcaactgcagagacagcttcacgagtatgagacggaactggaagacgagcgaaagcaacgtgccctggcagctgcagcaaagaagaagctggaaggggacctgaaagacctggagcttcaggccgactctgccatcaaggggagggaggaagccatcaagcagctacgcaaactgcaggctcagatgaaggactttcaaagagagctggaagatgcccgtgcctccagagatgagatctttgccacagccaaagagaatgagaagaaagccaagagcttggaagcagacctcatgcagctacaagaggacctcgccgccgctgagagggctcgcaaacaagcggacctcgagaaggaggaactggcagaggagctggccagtagcctgtcgggaaggaacgcactccaggacgagaagcgccgcctggaggcccggatcgcccagctggaggaggagctggaggaggagcagggcaacatggaggccatgagcgaccgggtccgcaaagccacacagcaggccgagcagctcagcaacgagctggccacagagcgcagcacggcccagaagaatgagagtgcccggcagcagctcgagcggcagaacaaggagctccggagcaagctccacgagatggagggggccgtcaagtccaagttcaagtccaccatcgcggcgctggaggccaagattgcacagctggaggagcaggtcgagcaggaggccagagagaaacaggcggccaccaagtcgctgaagcagaaagacaagaagctgaaggaaatcttgctgcaggtggaggacgagcgcaagatggccgagcagtacaaggagcaggcagagaaaggcaatgccagggtcaagcagctcaagaggcagctggaggaggcagaggaggagtcccagcgcatcaacgccaaccgcaggaagctgcagcgggagctggatgaggccacggagagcaacgaggccatgggccgcgaggtgaacgcactcaagagcaagctcaggcgaggaaacgagacctctttcgttccttctagaaggtctggaggacgtagagttattgaaaatgcagatggttctgaggaggaaacggacactcgagacgcagacttcaatggaaccaaggccagtgaatgatgatgaggactagtccctgttcccagagcccacttttttttctttttttgaaataaaatagcctgtctttcagatctcaaaggctcttttcagagccaccaaaaaaaaaaaaaaaaaaaaaaaaaaaaaaaaaaaaaaaaaaaaaaaaaaaaaaaaaaaaaaaaaaaaaaaaaaaaaaaaaaaaaaaaaaaaaaaaaaaaagaatt

SEQ ID NO: 1250 - RNA, 1834 nt, synthetic construct
  misc_feature 1..1834: note = Artificial____CBFbeta(1-165)_SMMHC(1527-1877) mRNA wt
  source 1..1834: mol_type = other RNA
aggagagtcccgcagtcggcgtccagcggctctgcttgttcgtgtgtgtgtcgttgcaggccttattcaagcttaccatgccgcgcgtcgtgcccgaccagagaagcaagttcgagaacgaggagttttttaggaagctgagccgcgagtgtgagattaagtacacgggcttcagggaccggccccacgaggaacgccaggcacgcttccagaacgcctgccgcgacggccgctcggaaatcgcttttgtggccacaggaaccaatctgtctctccagttttttccggccagctggcagggagaacagcgacaaacacctagccgagagtatgtcgacttagaaagagaagcaggcaaggtatatttgaaggctcccatgattctgaatggagtctgtgttatctggaaaggctggattgatctccaaagactggatggtatgggctgtctggagtttgatgaggagcgagcccagcaggaggatgcattagcacaacaggcctttgaagaggctcggagaaggacacgcgaatttgaagatagagacaggtctcatcgggaggaaatggaggtccatgagctggagaagtccaagcgggccctggagacccagatggaggagatgaagacgcagctggaagagctggaggacgagctgcaagccacggaggacgccaaactgcggctggaagtcaacatgcaggcgctcaagggccagttcgaaagggatctccaagcccgggacgagcagaatgaggagaagaggaggcaactgcagagacagcttcacgagtatgagacggaactggaagacgagcgaaagcaacgtgccctggcagctgcagcaaagaagaagctggaaggggacctgaaagacctggagcttcaggccgactctgccatcaaggggagggaggaagccatcaagcagctacgcaaactgcaggctcagatgaaggactttcaaagagagctggaagatgcccgtgcctccagagatgagatctttgccacagccaaagagaatgagaagaaagccaagagcttggaagcagacctcatgcagctacaagaggacctcgccgccgctgagagggctcgcaaacaagcggacctcgagaaggaggaactggcagaggagctggccagtagcctgtcgggaaggaacgcactccaggacgagaagcgccgcctggaggcccggatcgcccagctggaggaggagctggaggaggagcagggcaacatggaggccatgagcgaccgggtccgcaaagccacacagcaggccgagcagctcagcaacgagctggccacagagcgcagcacggcccagaagaatgagagtgcccggcagcagctcgagcggcagaacaaggagctccggagcaagctccacgagatggagggggccgtcaagtccaagttcaagtccaccatcgcggcgctggaggccaagattgcacagctggaggagcaggtcgagcaggaggccagagagaaacaggcggccaccaagtcgctgaagcagaaagacaagaagctgaaggaaatcttgctgcaggtggaggacgagcgcaagatggccgagcagtacaaggagcaggcagagaaaggcaatgcctgatgatgaggactagtccctgttcccagagcccacttttttttctttttttgaaataaaatagcctgtctttcagatctcaaaggctcttttcagagccaccaaaaaaaaaaaaaaaaaaaaaaaaaaaaaaaaaaaaaaaaaaaaaaaaaaaaaaaaaaaaaaaaaaaaaaaaaaaaaaaaaaaaaaaaaaaaaaaaaaaaagaatt

SEQ ID NO: 1251 - RNA, 895 nt, synthetic construct
  misc_feature 1..895: note = Artificial____CBFbeta(1-165)_Linker_Lifeact mRNA wt
  source 1..895: mol_type = other RNA
aggagagtcccgcagtcggcgtccagcggctctgcttgttcgtgtgtgtgtcgttgcaggccttattcaagcttaccatgccgcgcgtcgtgcccgaccagagaagcaagttcgagaacgaggagttttttaggaagctgagccgcgagtgtgagattaagtacacgggcttcagggaccggccccacgaggaacgccaggcacgcttccagaacgcctgccgcgacggccgctcggaaatcgcttttgtggccacaggaaccaatctgtctctccagttttttccggccagctggcagggagaacagcgacaaacacctagccgagagtatgtcgacttagaaagagaagcaggcaaggtatatttgaaggctcccatgattctgaatggagtctgtgttatctggaaaggctggattgatctccaaagactggatggtatgggctgtctggagtttgatgaggagcgagcccagcaggaggatgcattagcacaacaggcctttgaagaggctcggagaaggacacgcgaatttgaagatagagacaggtctcatcgggaggaaatggagggcgggagcggcgggtccggcgggagcggcggctccgggggcgggggcgtggccgacctgatcaagaagttcgagagcatcagcaaggaggagggggatccaccggtcgccacctgatgatgaggactagtccctgttcccagagcccacttttttttctttttttgaaataaaatagcctgtctttcagatctcaaaggctcttttcagagccaccaaaaaaaaaaaaaaaaaaaaaaaaaaaaaaaaaaaaaaaaaaaaaaaaaaaaaaaaaaaaaaaaaaaaaaaaaaaaaaaaaaaaaaaaaaaaaaaaaaaaagaatt

SEQ ID NO: 1252 - RNA, 862 nt, synthetic construct
  misc_feature 1..862: note = Artificial____CBFbeta(1-165)_HIF1alpha(549-575) mRNA wt
  source 1..862: mol_type = other RNA
aggagagtcccgcagtcggcgtccagcggctctgcttgttcgtgtgtgtgtcgttgcaggccttattcaagcttaccatgccgcgcgtcgtgcccgaccagagaagcaagttcgagaacgaggagttttttaggaagctgagccgcgagtgtgagattaagtacacgggcttcagggaccggccccacgaggaacgccaggcacgcttccagaacgcctgccgcgacggccgctcggaaatcgcttttgtggccacaggaaccaatctgtctctccagttttttccggccagctggcagggagaacagcgacaaacacctagccgagagtatgtcgacttagaaagagaagcaggcaaggtatatttgaaggctcccatgattctgaatggagtctgtgttatctggaaaggctggattgatctccaaagactggatggtatgggctgtctggagtttgatgaggagcgagcccagcaggaggatgcattagcacaacaggcctttgaagaggctcggagaaggacacgcgaatttgaagatagagacaggtctcatcgggaggaaatggagccattttctactcaggacacagatttagacttggagatgttagctccctatatcccaatggatgatgacttccagttacgttgatgatgaggactagtccctgttcccagagcccacttttttttctttttttgaaataaaatagcctgtctttcagatctcaaaggctcttttcagagccaccaaaaaaaaaaaaaaaaaaaaaaaaaaaaaaaaaaaaaaaaaaaaaaaaaaaaaaaaaaaaaaaaaaaaaaaaaaaaaaaaaaaaaaaaaaaaaaaaaaaaagaatt

SEQ ID NO: 1253 - RNA, 907 nt, synthetic construct
  misc_feature 1..907: note Artificial____CBFbeta(1-165)_Linker_HIF1alpha(549-575) mRNA wt
  source 1..907: mol_type = other RNA
aggagagtcccgcagtcggcgtccagcggctctgcttgttcgtgtgtgtgtcgttgcaggccttattcaagcttaccatgccgcgcgtcgtgcccgaccagagaagcaagttcgagaacgaggagttttttaggaagctgagccgcgagtgtgagattaagtacacgggcttcagggaccggccccacgaggaacgccaggcacgcttccagaacgcctgccgcgacggccgctcggaaatcgcttttgtggccacaggaaccaatctgtctctccagttttttccggccagctggcagggagaacagcgacaaacacctagccgagagtatgtcgacttagaaagagaagcaggcaaggtatatttgaaggctcccatgattctgaatggagtctgtgttatctggaaaggctggattgatctccaaagactggatggtatgggctgtctggagtttgatgaggagcgagcccagcaggaggatgcattagcacaacaggcctttgaagaggctcggagaaggacacgcgaatttgaagatagagacaggtctcatcgggaggaaatggagggcgggagcggcgggtccggcgggagcggcggctccgggggcgggccattttctactcaggacacagatttagacttggagatgttagctccctatatcccaatggatgatgacttccagttacgttgatgatgaggactagtccctgttcccagagcccacttttttttctttttttgaaataaaatagcctgtctttcagatctcaaaggctcttttcagagccaccaaaaaaaaaaaaaaaaaaaaaaaaaaaaaaaaaaaaaaaaaaaaaaaaaaaaaaaaaaaaaaaaaaaaaaaaaaaaaaaaaaaaaaaaaaaaaaaaaaaaagaatt

SEQ ID NO: 1254 - RNA, 2542 nt, synthetic construct
  misc_feature 1..2542: note = Artificial____RUNX1(1-177)_N_RUNX1T1a(31-604) mRNA wt
  source 1..2542: mol_type = other RNA
aggagagtcccgcagtcggcgtccagcggctctgcttgttcgtgtgtgtgtcgttgcaggccttattcaagcttaccatgcgtatccccgtagatgccagcacgagccgccgcttcacgccgccttccaccgcgctgagcccaggcaagatgagcgaggcgttgccgctgggcgccccggacgccggcgctgccctggccggcaagctgaggagcggcgaccgcagcatggtggaggtgctggccgaccacccgggcgagctggtgcgcaccgacagccccaacttcctctgctccgtgctgcctacgcactggcgctgcaacaagaccctgcccatcgctttcaaggtggtggccctaggggatgttccagatggcactctggtcactgtgatggctggcaatgatgaaaactactcggctgagctgagaaatgctaccgcagccatgaagaaccaggttgcaagatttaatgacctcaggtttgtcggtcgaagtggaagagggaaaagcttcactctgaccatcactgtcttcacaaacccaccgcaagtcgccacctaccacagagccatcaaaatcacagtggatgggccccgagaacctcgaaaccgtactgagaagcactccacaatgccagactcacctgtggatgtgaagacgcaatctaggctgactcctccaacaatgccacctcccccaactactcaaggagctccaagaaccagttcatttacaccgacaacgttaactaatggcacgagccattctcctacagccttgaatggcgccccctcaccacccaatggcttcagcaatgggccttcctcttcttcctcctcctctctggctaatcaacagctgcccccagcctgtggtgccaggcaactcagcaagctgaaaaggttccttactaccctgcagcagtttggcaatgacatttcacccgagataggagaaagagttcgcaccctcgttctgggactagtgaactccactttgacaattgaagaatttcattccaaactgcaagaagctactaacttcccactgagaccttttgtcatcccatttttgaaggccaacttgcccctgctgcagcgtgagctcctccactgcgcaagactggccaaacagaaccctgcccagtacctcgcccagcatgaacagctgcttctggatgccagcaccacctcacctgttgactcctcagagctgcttctcgatgtgaacgaaaacgggaagaggcgaactccagacagaaccaaagaaaatggctttgacagagagcctttgcactcagaacatccaagcaagcgaccatgcactattagcccaggccagcggtacagtccaaataacggcttatcctaccagcccaatggcctgcctcaccctaccccacctccacctcagcattaccgtttggatgatatggccattgcccaccactacagggactcctatcgacaccccagccacagggacctcagggacagaaacagacctatggggttgcatggcacacgtcaagaagaaatgattgatcacagactaacagacagagaatgggcagaagagtggaaacatcttgaccatctgttaaactgcataatggacatggtagaaaaaacaaggcgatctctcaccgtactaaggcggtgtcaagaagcagaccgggaagaattgaattactggatccggcggtacagtgacgccgaggacttaaaaaaaggtggcggcagtagcagcagccactctaggcagcagagtcccgtcaacccagacccagttgcactagacgcgcatcgggaattccttcacaggcctgcgtctggatacgtgccagaggagatctggaagaaagctgaggaggccgtcaatgaggtgaagcgccaggcgatgacggagctgcagaaggccgtgtctgaggcggagcggaaagcccacgacatgatcacaacagagagggccaagatggagcgcacggtcgccgaggccaaacggcaggcggcggaggacgcactggcagttatcaatcagcaggaggattcaagcgagagttgctggaattgtggccgtaaagcgagtgaaacctgcagtggctgtaacacagcccgatactgtggctcattttgccagcacaaagactgggagaagcaccatcacatctgtggacagaccctgcaggcccagcagcagggagacacacctgcagtcagctcctctgtcacgcccaacagcggggctgggagcccgatggacacaccaccagcagccactccgaggtcaaccaccccgggaaccccttccaccatagagacaacccctcgctgatgatgaggactagtccctgttcccagagcccacttttttttctttttttgaaataaaatagcctgtctttcagatctcaaaggctcttttcagagccaccaaaaaaaaaaaaaaaaaaaaaaaaaaaaaaaaaaaaaaaaaaaaaaaaaaaaaaaaaaaaaaaaaaaaaaaaaaaaaaaaaaaaaaaaaaaaaaaaaaaaagaatt

SEQ ID NO: 1255 - RNA, 1057 nt, synthetic construct
  misc_feature 1..1057: note = Artificial____RUNX1(1-241)_RUNX1T1b(short) mRNA wt
  source 1..1057: mol_type = other RNA
aggagagtcccgcagtcggcgtccagcggctctgcttgttcgtgtgtgtgtcgttgcaggccttattcaagcttaccatgcgtatccccgtagatgccagcacgagccgccgcttcacgccgccttccaccgcgctgagcccaggcaagatgagcgaggcgttgccgctgggcgccccggacgccggcgctgccctggccggcaagctgaggagcggcgaccgcagcatggtggaggtgctggccgaccacccgggcgagctggtgcgcaccgacagccccaacttcctctgctccgtgctgcctacgcactggcgctgcaacaagaccctgcccatcgctttcaaggtggtggccctaggggatgttccagatggcactctggtcactgtgatggctggcaatgatgaaaactactcggctgagctgagaaatgctaccgcagccatgaagaaccaggttgcaagatttaatgacctcaggtttgtcggtcgaagtggaagagggaaaagcttcactctgaccatcactgtcttcacaaacccaccgcaagtcgccacctaccacagagccatcaaaatcacagtggatgggccccgagaacctcgaagacatcggcagaaactagatgatcagaccaagcccgggagcttgtccttttccgagcggctcagtgaactggagcagctgcggcgcacagccatgagggtcagcccacaccacccagcccccacgcccaaccctcgtgcctccctgaaccactccactgcctttaaccctcagcctcagagtcagatgcaggaggtgggcttctgccacgtcgcccaggtggggctgaagctcctgggctgatgatgaggactagtccctgttcccagagcccacttttttttctttttttgaaataaaatagcctgtctttcagatctcaaaggctcttttcagagccaccaaaaaaaaaaaaaaaaaaaaaaaaaaaaaaaaaaaaaaaaaaaaaaaaaaaaaaaaaaaaaaaaaaaaaaaaaaaaaaaaaaaaaaaaaaaaaaaaaaaaagaatt

SEQ ID NO: 1256 - RNA, 2761 nt, synthetic construct
  misc_feature 1..2761: note = Artificial____RUNX1(1-241)_V_RUNX1T1b(22-604) mRNA wt
  source 1..2761: mol_type = other RNA
aggagagtcccgcagtcggcgtccagcggctctgcttgttcgtgtgtgtgtcgttgcaggccttattcaagcttaccatgcgtatccccgtagatgccagcacgagccgccgcttcacgccgccttccaccgcgctgagcccaggcaagatgagcgaggcgttgccgctgggcgccccggacgccggcgctgccctggccggcaagctgaggagcggcgaccgcagcatggtggaggtgctggccgaccacccgggcgagctggtgcgcaccgacagccccaacttcctctgctccgtgctgcctacgcactggcgctgcaacaagaccctgcccatcgctttcaaggtggtggccctaggggatgttccagatggcactctggtcactgtgatggctggcaatgatgaaaactactcggctgagctgagaaatgctaccgcagccatgaagaaccaggttgcaagatttaatgacctcaggtttgtcggtcgaagtggaagagggaaaagcttcactctgaccatcactgtcttcacaaacccaccgcaagtcgccacctaccacagagccatcaaaatcacagtggatgggccccgagaacctcgaagacatcggcagaaactagatgatcagaccaagcccgggagcttgtccttttccgagcggctcagtgaactggagcagctgcggcgcacagccatgagggtcagcccacaccacccagcccccacgcccaaccctcgtgcctccctgaaccactccactgcctttaaccctcagcctcagagtcagatgcaggtgggtcctgagaaaagggtgccagcgatgcctggatcgcctgtggaagtgaagatacagtccagatcctcacctcccaccatgccacccctcccaccaataaatcctggaggaccgaggccagtgtccttcactcctactgcattaagcaatggcatcaaccattctcctcctaccctgaatggtgccccatcaccgccacagagattcagcaatggtcctgcctcctccacatcatctgcactcacaaatcagcaattgccagccacttgtggtgctcgacaactcagcaagttgaaacgctttcttaccactctgcaacagtttggcaatgacatctcccctgagattggggagaaggtgcggactcttgttcttgcactggtgaactcaacagtgacaattgaggaattccactgtaagctccaagaagccacaaactttccccttcgtccttttgtgattccatttctcaaggccaacctgcccctgctgcagcgggaactgctgcactgcgctcgggcggccaagcagaccccatcccagtacctggctcagcacgaacaccttctgctcaacacaagcattgcatcgcctgctgactcgtcagagttgctcatggaggtgcacggaaatgggaagaggcccagtccagagaggagagaagagaatagttttgatagagacacaattgctcctgagcctcctgccaagagagtatgtaccatcagccctgctcctcggcacagtcctgctctcactgtgcccctcatgaatcccgggggccaattccatcctacccctccacctcttcagcattacaccttagaggatattgcaacttctcacctgtatcgggaacccaacaagatgctagagcatcgagaagttcgtgatagacaccacagtcttggtctaaatggaggctatcaagatgagttggtagatcatcgtttgacagaaagggaatgggctgatgaatggaaacatcttgaccatgcgctgaattgcattatggaaatggtagagaaaacaaggcgctctatggcagttctgcggcgctgtcaggaatcagatcgtgaagaactcaactactggaaaagacggtacaatgaaaacacagagctgaggaaaacggggaccgagttggtctccaggcagcacagccctgggagtgcagattctctcagcaatgattctcagagagagttcaacagcaggccaggtacaggatacgtacctgtggagttttggaaaaaaacagaagaagctgtgaataaggtgaaaattcaggccatgtcagaagtacagaaggccgtcgctgaggcagagcagaaagcctttgaagtgattgcaacagagagagcacgaatggagcaaaccatagcggatgtcaagcggcaggccgcagaggatgctttcctcgtcatcaatgagcaagaggagtccacggagaactgctggaactgtggccgcaaagccagcgagacatgcagtggctgcaatatcgcgcgatactgtggctctttctgccagcacaaggactgggagcggcaccaccgcctctgtggtcagaacctgcatggccagagcccccacggccagggccggccgctgcttcctgtaggcaggggctcctctgccaggtccgccgactgcagcgtgcccagcccagccctcgacaagacctcggcaaccacatcgcgttcctcaacacctgcttctgtgacagctatcgacaccaacggactctgatgatgaggactagtccctgttcccagagcccacttttttttctttttttgaaataaaatagcctgtctttcagatctcaaaggctcttttcagagccaccaaaaaaaaaaaaaaaaaaaaaaaaaaaaaaaaaaaaaaaaaaaaaaaaaaaaaaaaaaaaaaaaaaaaaaaaaaaaaaaaaaaaaaaaaaaaaaaaaaaaagaatt

SEQ ID NO: 1257 - RNA, 2761 nt, synthetic construct
  misc_feature 1..2761: note = Artificial____RUNX1(1-241)_I_RUNX1T1b(22-604) mRNA wt
  source 1..2761: mol_type = other RNA
aggagagtcccgcagtcggcgtccagcggctctgcttgttcgtgtgtgtgtcgttgcaggccttattcaagcttaccatgcgtatccccgtagatgccagcacgagccgccgcttcacgccgccttccaccgcgctgagcccaggcaagatgagcgaggcgttgccgctgggcgccccggacgccggcgctgccctggccggcaagctgaggagcggcgaccgcagcatggtggaggtgctggccgaccacccgggcgagctggtgcgcaccgacagccccaacttcctctgctccgtgctgcctacgcactggcgctgcaacaagaccctgcccatcgctttcaaggtggtggccctaggggatgttccagatggcactctggtcactgtgatggctggcaatgatgaaaactactcggctgagctgagaaatgctaccgcagccatgaagaaccaggttgcaagatttaatgacctcaggtttgtcggtcgaagtggaagagggaaaagcttcactctgaccatcactgtcttcacaaacccaccgcaagtcgccacctaccacagagccatcaaaatcacagtggatgggccccgagaacctcgaagacatcggcagaaactagatgatcagaccaagcccgggagcttgtccttttccgagcggctcagtgaactggagcagctgcggcgcacagccatgagggtcagcccacaccacccagcccccacgcccaaccctcgtgcctccctgaaccactccactgcctttaaccctcagcctcagagtcagatgcagatcggtcctgagaaaagggtgccagcgatgcctggatcgcctgtggaagtgaagatacagtccagatcctcacctcccaccatgccacccctcccaccaataaatcctggaggaccgaggccagtgtccttcactcctactgcattaagcaatggcatcaaccattctcctcctaccctgaatggtgccccatcaccgccacagagattcagcaatggtcctgcctcctccacatcatctgcactcacaaatcagcaattgccagccacttgtggtgctcgacaactcagcaagttgaaacgctttcttaccactctgcaacagtttggcaatgacatctcccctgagattggggagaaggtgcggactcttgttcttgcactggtgaactcaacagtgacaattgaggaattccactgtaagctccaagaagccacaaactttccccttcgtccttttgtgattccatttctcaaggccaacctgcccctgctgcagcgggaactgctgcactgcgctcgggcggccaagcagaccccatcccagtacctggctcagcacgaacaccttctgctcaacacaagcattgcatcgcctgctgactcgtcagagttgctcatggaggtgcacggaaatgggaagaggcccagtccagagaggagagaagagaatagttttgatagagacacaattgctcctgagcctcctgccaagagagtatgtaccatcagccctgctcctcggcacagtcctgctctcactgtgcccctcatgaatcccgggggccaattccatcctacccctccacctcttcagcattacaccttagaggatattgcaacttctcacctgtatcgggaacccaacaagatgctagagcatcgagaagttcgtgatagacaccacagtcttggtctaaatggaggctatcaagatgagttggtagatcatcgtttgacagaaagggaatgggctgatgaatggaaacatcttgaccatgcgctgaattgcattatggaaatggtagagaaaacaaggcgctctatggcagttctgcggcgctgtcaggaatcagatcgtgaagaactcaactactggaaaagacggtacaatgaaaacacagagctgaggaaaacggggaccgagttggtctccaggcagcacagccctgggagtgcagattctctcagcaatgattctcagagagagttcaacagcaggccaggtacaggatacgtacctgtggagttttggaaaaaaacagaagaagctgtgaataaggtgaaaattcaggccatgtcagaagtacagaaggccgtcgctgaggcagagcagaaagcctttgaagtgattgcaacagagagagcacgaatggagcaaaccatagcggatgtcaagcggcaggccgcagaggatgctttcctcgtcatcaatgagcaagaggagtccacggagaactgctggaactgtggccgcaaagccagcgagacatgcagtggctgcaatatcgcgcgatactgtggctctttctgccagcacaaggactgggagcggcaccaccgcctctgtggtcagaacctgcatggccagagcccccacggccagggccggccgctgcttcctgtaggcaggggctcctctgccaggtccgccgactgcagcgtgcccagcccagccctcgacaagacctcggcaaccacatcgcgttcctcaacacctgcttctgtgacagctatcgacaccaacggactctgatgatgaggactagtccctgttcccagagcccacttttttttctttttttgaaataaaatagcctgtctttcagatctcaaaggctcttttcagagccaccaaaaaaaaaaaaaaaaaaaaaaaaaaaaaaaaaaaaaaaaaaaaaaaaaaaaaaaaaaaaaaaaaaaaaaaaaaaaaaaaaaaaaaaaaaaaaaaaaaaaagaatt

SEQ ID NO: 1258 - RNA, 1645 nt, synthetic construct
  misc_feature 1..1645: note = Homo sapiens__Q01196-1__RUNX1(K83E_R174Q) mRNA wt mod
  source 1..1645: mol_type = other RNA
aggagagtcccgcagtcggcgtccagcggctctgcttgttcgtgtgtgtgtcgttgcaggccttattcaagcttaccatgcgtatccccgtagatgccagcacgagccgccgcttcacgccgccttccaccgcgctgagcccaggcaagatgagcgaggcgttgccgctgggcgccccggacgccggcgctgccctggccggcaagctgaggagcggcgaccgcagcatggtggaggtgctggccgaccacccgggcgagctggtgcgcaccgacagccccaacttcctctgctccgtgctgcctacgcactggcgctgcaacgagaccctgcccatcgctttcaaggtggtggccctaggggatgttccagatggcactctggtcactgtgatggctggcaatgatgaaaactactcggctgagctgagaaatgctaccgcagccatgaagaaccaggttgcaagatttaatgacctcaggtttgtcggtcgaagtggaagagggaaaagtttcactctgaccatcactgtcttcacaaacccaccgcaagtcgccacctaccacagagccatcaaaatcacagtggatgggccccaggaacctcgaagacatcggcagaaactagatgatcagaccaagcccgggagcttgtccttttccgagcggctcagtgaactggagcagctgcggcgcacagccatgagggtcagcccacaccacccagcccccacgcccaaccctcgtgcctccctgaaccactccactgcctttaaccctcagcctcagagtcagatgcaggatacaaggcagatccaaccatccccaccgtggtcctacgatcagtcctaccaatacctgggatccattgcctctccttctgtgcacccagcaacgcccatttcacctggacgtgccagcggcatgacaaccctctctgcagaactttccagtcgactctcaacggcacccgacctgacagcgttcagcgacccgcgccagttccccgcgctgccctccatctccgacccccgcatgcactatccaggcgccttcacctactccccgacgccggtcacctcgggcatcggcatcggcatgtcggccatgggctcggccacgcgctaccacacctacctgccgccgccctaccccggctcgtcgcaagcgcagggaggcccgttccaagccagctcgccctcctaccacctgtactacggcgcctcggccggctcctaccagttctccatggtgggcggcgagcgctcgccgccgcgcatcctgccgccctgcaccaacgcctccaccggctccgcgctgctcaaccccagcctcccgaaccagagcgacgtggtggaggccgagggcagccacagcaactcccccaccaacatggcgccctccgcgcgcctggaggaggccgtgtggaggccctactgatgatgaggactagtccctgttcccagagcccacttttttttctttttttgaaataaaatagcctgtctttcagatctcaaaggctcttttcagagccaccaaaaaaaaaaaaaaaaaaaaaaaaaaaaaaaaaaaaaaaaaaaaaaaaaaaaaaaaaaaaaaaaaaaaaaaaaaaaaaaaaaaaaaaaaaaaaaaaaaaaagaatt

SEQ ID NO: 1259 - RNA, 2119 nt, synthetic construct
  misc_feature 1..2119: note = Homo sapiens____CBFbeta(1-165)_SMMHC(1527-1972) mRNA wt mod
  source 1..2119: mol_type = other RNA
aggagagtcccgcagtcggcgtccagcggctctgcttgttcgtgtgtgtgtcgttgcaggccttattcaagcttaccatgccgcgcgtcgtgcccgaccagagaagcaagtttgagaacgaggagttctttaggaagctgagccgcgagtgtgagattaagtacacgggctttagggaccggccccacgaggaacgccaggcacgcttccagaacgcctgccgcgacggccgctcggaaatcgcttttgtggccacaggaaccaatctgtctctccagttctttccggccagctggcagggagaacagcgacaaacacctagccgagagtatgtcgacttagaaagagaagcaggcaaggtatatttgaaggctcccatgattctgaatggagtctgtgttatctggaaaggctggattgatctccaaagactggatggtatgggctgtctggagtttgatgaggagcgagcccagcaggaggatgcattagcacaacaggcctttgaagaggctcggagaaggacacgcgaatttgaagatagagacaggtctcatcgggaggaaatggaggtccatgagctggagaagtccaagcgggccctggagacccagatggaggagatgaagacgcagctggaggaactggaggacgagctgcaagccacggaggacgccaaactgcggctggaagtcaacatgcaggcgctcaagggccagttcgaaagggatctccaagcccgggacgagcagaatgaggagaagaggaggcaactgcagagacagcttcacgagtatgagacggaactggaagacgagcgaaagcaacgtgccctggcagctgcagcaaagaagaagctggaaggggacctgaaagacctggagcttcaggccgactctgccatcaaggggagggaggaagccatcaagcagctacgcaaactgcaggctcagatgaaggactttcaaagagagctggaagatgcccgtgcctccagagatgagatctttgccacagccaaagagaatgagaagaaagccaagagcttggaagcagacctcatgcagctacaagaggacctcgccgccgctgagagggctcgcaaacaagcggacctcgagaaggaggaactggcagaggagctggccagtagcctgtcgggaaggaacgcactccaggacgagaagcgccgcctggaggcccggatcgcccagctggaggaggagctggaggaggagcagggcaacatggaggccatgagcgaccgggtccgcaaagccacacagcaggccgagcagctcagcaacgagctggccacagagcgcagcacggcccagaagaatgagagtgcccggcagcagctcgagcggcagaacaaggagctccggagcaagctccacgagatggagggggccgtcaagtccaagttcaagtccaccatcgcggcgctggaggccaagattgcacagctggaggagcaggtcgagcaggaggccagagagaaacaggcggccaccaagtcgctgaagcagaaagacaagaagctgaaggaaatcttgctccaggtggaggacgagcgcaagatggccgagcagtacaaggagcaggcagagaaaggcaatgccagggtcaagcagctgaagaggcagctggaggaggcagaggaggagtcccagcgcatcaacgccaaccgcaggaagctgcagcgggagctggatgaggccacggagagcaacgaggccatgggccgcgaggtgaacgcactcaagagcaagctcaggcgaggaaacgagacctctttcgttccttctagaaggtctggaggacgtagagttattgaaaatgcagatggttctgaggaggaaacggacactcgagacgcagacttcaatggaaccaaggccagtgaatgatgatgaggactagtccctgttcccagagcccacttttttttctttttttgaaataaaatagcctgtctttcagatctcaaaggctcttttcagagccaccaaaaaaaaaaaaaaaaaaaaaaaaaaaaaaaaaaaaaaaaaaaaaaaaaaaaaaaaaaaaaaaaaaaaaaaaaaaaaaaaaaaaaaaaaaaaaaaaaaaaagaatt

SEQ ID NO: 1260 - RNA, 1834 nt, synthetic construct
  misc_feature 1..1834: note = Artificial____CBFbeta(1-165)_SMMHC(1527-1877) mRNA wt mod
  source 1..1834: mol_type = other RNA
aggagagtcccgcagtcggcgtccagcggctctgcttgttcgtgtgtgtgtcgttgcaggccttattcaagcttaccatgccgcgcgtcgtgcccgaccagagaagcaagtttgagaacgaggagttctttaggaagctgagccgcgagtgtgagattaagtacacgggctttagggaccggccccacgaggaacgccaggcacgcttccagaacgcctgccgcgacggccgctcggaaatcgcttttgtggccacaggaaccaatctgtctctccagttctttccggccagctggcagggagaacagcgacaaacacctagccgagagtatgtcgacttagaaagagaagcaggcaaggtatatttgaaggctcccatgattctgaatggagtctgtgttatctggaaaggctggattgatctccaaagactggatggtatgggctgtctggagtttgatgaggagcgagcccagcaggaggatgcattagcacaacaggcctttgaagaggctcggagaaggacacgcgaatttgaagatagagacaggtctcatcgggaggaaatggaggtccatgagctggagaagtccaagcgggccctggagacccagatggaggagatgaagacgcagctggaggaactggaggacgagctgcaagccacggaggacgccaaactgcggctggaagtcaacatgcaggcgctcaagggccagttcgaaagggatctccaagcccgggacgagcagaatgaggagaagaggaggcaactgcagagacagcttcacgagtatgagacggaactggaagacgagcgaaagcaacgtgccctggcagctgcagcaaagaagaagctggaaggggacctgaaagacctggagcttcaggccgactctgccatcaaggggagggaggaagccatcaagcagctacgcaaactgcaggctcagatgaaggactttcaaagagagctggaagatgcccgtgcctccagagatgagatctttgccacagccaaagagaatgagaagaaagccaagagcttggaagcagacctcatgcagctacaagaggacctcgccgccgctgagagggctcgcaaacaagcggacctcgagaaggaggaactggcagaggagctggccagtagcctgtcgggaaggaacgcactccaggacgagaagcgccgcctggaggcccggatcgcccagctggaggaggagctggaggaggagcagggcaacatggaggccatgagcgaccgggtccgcaaagccacacagcaggccgagcagctcagcaacgagctggccacagagcgcagcacggcccagaagaatgagagtgcccggcagcagctcgagcggcagaacaaggagctccggagcaagctccacgagatggagggggccgtcaagtccaagttcaagtccaccatcgcggcgctggaggccaagattgcacagctggaggagcaggtcgagcaggaggccagagagaaacaggcggccaccaagtcgctgaagcagaaagacaagaagctgaaggaaatcttgctccaggtggaggacgagcgcaagatggccgagcagtacaaggagcaggcagagaaaggcaatgcctgatgatgaggactagtccctgttcccagagcccacttttttttctttttttgaaataaaatagcctgtctttcagatctcaaaggctcttttcagagccaccaaaaaaaaaaaaaaaaaaaaaaaaaaaaaaaaaaaaaaaaaaaaaaaaaaaaaaaaaaaaaaaaaaaaaaaaaaaaaaaaaaaaaaaaaaaaaaaaaaaaagaatt

SEQ ID NO: 1261 - RNA, 895 nt, synthetic construct
  misc_feature 1..895: note = Artificial____CBFbeta(1-165)_Linker_Lifeact mRNA wt mod
  source 1..895: mol_type = other RNA
aggagagtcccgcagtcggcgtccagcggctctgcttgttcgtgtgtgtgtcgttgcaggccttattcaagcttaccatgccgcgcgtcgtgcccgaccagagaagcaagtttgagaacgaggagttctttaggaagctgagccgcgagtgtgagattaagtacacgggctttagggaccggccccacgaggaacgccaggcacgcttccagaacgcctgccgcgacggccgctcggaaatcgcttttgtggccacaggaaccaatctgtctctccagttctttccggccagctggcagggagaacagcgacaaacacctagccgagagtatgtcgacttagaaagagaagcaggcaaggtatatttgaaggctcccatgattctgaatggagtctgtgttatctggaaaggctggattgatctccaaagactggatggtatgggctgtctggagtttgatgaggagcgagcccagcaggaggatgcattagcacaacaggcctttgaagaggctcggagaaggacacgcgaatttgaagatagagacaggtctcatcgggaggaaatggagggcgggagcggcgggtccggcgggagcggcggctccgggggcgggggcgtggccgacctgatcaagaagttcgagagcatctccaaggaggagggggacccgcccgtcgccacctgatgatgaggactagtccctgttcccagagcccacttttttttctttttttgaaataaaatagcctgtctttcagatctcaaaggctcttttcagagccaccaaaaaaaaaaaaaaaaaaaaaaaaaaaaaaaaaaaaaaaaaaaaaaaaaaaaaaaaaaaaaaaaaaaaaaaaaaaaaaaaaaaaaaaaaaaaaaaaaaaaagaatt

SEQ ID NO: 1262 - RNA, 862 nt, synthetic construct
  misc_feature 1..862: note = Artificial____CBFbeta(1-165)_HIF1alpha(549-575) mRNA wt mod
  source 1..862: mol_type = other RNA
aggagagtcccgcagtcggcgtccagcggctctgcttgttcgtgtgtgtgtcgttgcaggccttattcaagcttaccatgccgcgcgtcgtgcccgaccagagaagcaagtttgagaacgaggagttctttaggaagctgagccgcgagtgtgagattaagtacacgggctttagggaccggccccacgaggaacgccaggcacgcttccagaacgcctgccgcgacggccgctcggaaatcgcttttgtggccacaggaaccaatctgtctctccagttctttccggccagctggcagggagaacagcgacaaacacctagccgagagtatgtcgacttagaaagagaagcaggcaaggtatatttgaaggctcccatgattctgaatggagtctgtgttatctggaaaggctggattgatctccaaagactggatggtatgggctgtctggagtttgatgaggagcgagcccagcaggaggatgcattagcacaacaggcctttgaagaggctcggagaaggacacgcgaatttgaagatagagacaggtctcatcgggaggaaatggagccattttctactcaggacacagatttagacttggagatgttagctccctatatcccaatggatgatgacttccagttacgttgatgatgaggactagtccctgttcccagagcccacttttttttctttttttgaaataaaatagcctgtctttcagatctcaaaggctcttttcagagccaccaaaaaaaaaaaaaaaaaaaaaaaaaaaaaaaaaaaaaaaaaaaaaaaaaaaaaaaaaaaaaaaaaaaaaaaaaaaaaaaaaaaaaaaaaaaaaaaaaaaaagaatt

SEQ ID NO: 1263 - RNA, 907 nt, synthetic construct
  misc_feature 1..907: note Artificial____CBFbeta(1-165)_Linker_HIF1alpha(549-575) mRNA wt mod
  source 1..907: mol_type = other RNA
aggagagtcccgcagtcggcgtccagcggctctgcttgttcgtgtgtgtgtcgttgcaggccttattcaagcttaccatgccgcgcgtcgtgcccgaccagagaagcaagtttgagaacgaggagttctttaggaagctgagccgcgagtgtgagattaagtacacgggctttagggaccggccccacgaggaacgccaggcacgcttccagaacgcctgccgcgacggccgctcggaaatcgcttttgtggccacaggaaccaatctgtctctccagttctttccggccagctggcagggagaacagcgacaaacacctagccgagagtatgtcgacttagaaagagaagcaggcaaggtatatttgaaggctcccatgattctgaatggagtctgtgttatctggaaaggctggattgatctccaaagactggatggtatgggctgtctggagtttgatgaggagcgagcccagcaggaggatgcattagcacaacaggcctttgaagaggctcggagaaggacacgcgaatttgaagatagagacaggtctcatcgggaggaaatggagggcgggagcggcgggtccggcgggagcggcggctccgggggcgggccattttctactcaggacacagatttagacttggagatgttagctccctatatcccaatggatgatgacttccagttacgttgatgatgaggactagtccctgttcccagagcccacttttttttctttttttgaaataaaatagcctgtctttcagatctcaaaggctcttttcagagccaccaaaaaaaaaaaaaaaaaaaaaaaaaaaaaaaaaaaaaaaaaaaaaaaaaaaaaaaaaaaaaaaaaaaaaaaaaaaaaaaaaaaaaaaaaaaaaaaaaaaaagaatt

SEQ ID NO: 1264 - RNA, 2542 nt, synthetic construct
  misc_feature 1..2542: note = Artificial____RUNX1(1-177)_N_RUNX1T1a(31-604) mRNA wt mod
  source 1..2542: mol_type = other RNA
aggagagtcccgcagtcggcgtccagcggctctgcttgttcgtgtgtgtgtcgttgcaggccttattcaagcttaccatgcgtatccccgtagatgccagcacgagccgccgcttcacgccgccttccaccgcgctgagcccaggcaagatgagcgaggcgttgccgctgggcgccccggacgccggcgctgccctggccggcaagctgaggagcggcgaccgcagcatggtggaggtgctggccgaccacccgggcgagctggtgcgcaccgacagccccaacttcctctgctccgtgctgcctacgcactggcgctgcaacaagaccctgcccatcgctttcaaggtggtggccctaggggatgttccagatggcactctggtcactgtgatggctggcaatgatgaaaactactcggctgagctgagaaatgctaccgcagccatgaagaaccaggttgcaagatttaatgacctcaggtttgtcggtcgaagtggaagagggaaaagtttcactctgaccatcactgtcttcacaaacccaccgcaagtcgccacctaccacagagccatcaaaatcacagtggatgggccccgagaacctcgaaaccgtactgagaagcactccacaatgccagactcacctgtggatgtgaagacgcaatctaggctgactcctccaacaatgccacctcccccaactactcaaggagctccaagaaccagttcatttacaccgacaacgttaactaatggcacgagccattctcctacagccttgaatggcgccccctcaccacccaatggcttcagcaatgggccttcctcttcttcctcctcctctctggctaatcaacagctgcccccagcctgtggtgccaggcaactcagcaagctgaaaaggttccttactaccctgcagcagtttggcaatgacatttcacccgagataggagaaagagttcgcaccctcgttctgggacttgtgaactccactttgacaattgaagaatttcattccaaactgcaagaagctactaacttcccactgagaccttttgtcatcccatttttgaaggccaacttgcccctgctgcagcgtgagctcctccactgcgcaagactggccaaacagaaccctgcccagtacctcgcccagcatgaacagctgcttctggatgccagcaccacctcacctgttgactcctcagagctgcttctcgatgtgaacgaaaacgggaagaggcgaactccagacagaaccaaagaaaatggctttgacagagagcctttgcactcagaacatccaagcaagcgaccatgcactattagcccaggccagcggtacagtccaaataacggcttatcctaccagcccaatggcctgcctcaccctaccccacctccacctcagcattaccgtttggatgatatggccattgcccaccactacagggactcctatcgacaccccagccacagggacctcagggacagaaacagacctatggggttgcatggcacacgtcaagaagaaatgattgatcacagactaacagacagagaatgggcagaagagtggaaacatcttgaccatctgttaaactgcataatggacatggtagaaaaaacaaggcgatctctcaccgtactaaggcggtgtcaagaagcagaccgggaagaattgaattactggatccggcggtacagtgacgccgaggacttaaaaaaaggtggcggcagtagcagcagccactctaggcagcagagtcccgtcaacccagacccagttgcactagacgcgcatcgggagttccttcacaggcctgcgtctggatacgtgccagaggagatctggaagaaagctgaggaggccgtcaatgaggtgaagcgccaggcgatgacggagctgcagaaggccgtgtctgaggcggagcggaaagcccacgacatgatcacaacagagagggccaagatggagcgcacggtcgccgaggccaaacggcaggcggcggaggacgcactggcagttatcaatcagcaggaggattcaagcgagagttgctggaattgtggccgtaaagcgagtgaaacctgcagtggctgtaacacagcccgatactgtggctcattttgccagcacaaagactgggagaagcaccatcacatctgtggacagaccctgcaggcccagcagcagggagacacacctgcagtcagctcctctgtcacgcccaacagcggggctgggagcccgatggacacaccaccagcagccactccgaggtcaaccaccccgggaaccccttccaccatagagacaacccctcgctgatgatgaggactagtccctgttcccagagcccacttttttttctttttttgaaataaaatagcctgtctttcagatctcaaaggctcttttcagagccaccaaaaaaaaaaaaaaaaaaaaaaaaaaaaaaaaaaaaaaaaaaaaaaaaaaaaaaaaaaaaaaaaaaaaaaaaaaaaaaaaaaaaaaaaaaaaaaaaaaaaagaatt

SEQ ID NO: 1265 - RNA, 1057 nt, synthetic construct
  misc_feature 1..1057: note = Artificial____RUNX1(1-241)_RUNX1T1b(short) mRNA wt mod
  source 1..1057: mol_type = other RNA
aggagagtcccgcagtcggcgtccagcggctctgcttgttcgtgtgtgtgtcgttgcaggccttattcaagcttaccatgcgtatccccgtagatgccagcacgagccgccgcttcacgccgccttccaccgcgctgagcccaggcaagatgagcgaggcgttgccgctgggcgccccggacgccggcgctgccctggccggcaagctgaggagcggcgaccgcagcatggtggaggtgctggccgaccacccgggcgagctggtgcgcaccgacagccccaacttcctctgctccgtgctgcctacgcactggcgctgcaacaagaccctgcccatcgctttcaaggtggtggccctaggggatgttccagatggcactctggtcactgtgatggctggcaatgatgaaaactactcggctgagctgagaaatgctaccgcagccatgaagaaccaggttgcaagatttaatgacctcaggtttgtcggtcgaagtggaagagggaaaagtttcactctgaccatcactgtcttcacaaacccaccgcaagtcgccacctaccacagagccatcaaaatcacagtggatgggccccgagaacctcgaagacatcggcagaaactagatgatcagaccaagcccgggagcttgtccttttccgagcggctcagtgaactggagcagctgcggcgcacagccatgagggtcagcccacaccacccagcccccacgcccaaccctcgtgcctccctgaaccactccactgcctttaaccctcagcctcagagtcagatgcaggaggtgggcttctgccacgtcgcccaggtggggctgaagctcctgggctgatgatgaggactagtccctgttcccagagcccacttttttttctttttttgaaataaaatagcctgtctttcagatctcaaaggctcttttcagagccaccaaaaaaaaaaaaaaaaaaaaaaaaaaaaaaaaaaaaaaaaaaaaaaaaaaaaaaaaaaaaaaaaaaaaaaaaaaaaaaaaaaaaaaaaaaaaaaaaaaaaagaatt

SEQ ID NO: 1266 - RNA, 2761 nt, synthetic construct
  misc_feature 1..2761: note = Artificial____RUNX1(1-241)_V_RUNX1T1b(22-604) mRNA wt mod
  source 1..2761: mol_type = other RNA
aggagagtcccgcagtcggcgtccagcggctctgcttgttcgtgtgtgtgtcgttgcaggccttattcaagcttaccatgcgtatccccgtagatgccagcacgagccgccgcttcacgccgccttccaccgcgctgagcccaggcaagatgagcgaggcgttgccgctgggcgccccggacgccggcgctgccctggccggcaagctgaggagcggcgaccgcagcatggtggaggtgctggccgaccacccgggcgagctggtgcgcaccgacagccccaacttcctctgctccgtgctgcctacgcactggcgctgcaacaagaccctgcccatcgctttcaaggtggtggccctaggggatgttccagatggcactctggtcactgtgatggctggcaatgatgaaaactactcggctgagctgagaaatgctaccgcagccatgaagaaccaggttgcaagatttaatgacctcaggtttgtcggtcgaagtggaagagggaaaagtttcactctgaccatcactgtcttcacaaacccaccgcaagtcgccacctaccacagagccatcaaaatcacagtggatgggccccgagaacctcgaagacatcggcagaaactagatgatcagaccaagcccgggagcttgtccttttccgagcggctcagtgaactggagcagctgcggcgcacagccatgagggtcagcccacaccacccagcccccacgcccaaccctcgtgcctccctgaaccactccactgcctttaaccctcagcctcagagtcagatgcaggtgggtcctgagaaaagggtgccagcgatgcctggatcgcctgtggaagtgaagatacagtccagatcctcacctcccaccatgccacccctcccaccaataaatcctggaggaccgaggccagtgtccttcactcctactgcattaagcaatggcatcaaccattctcctcctaccctgaatggtgccccatcaccgccacagagattcagcaatggtcctgcctcctccacatcatctgcactcacaaatcagcaattgccagccacttgtggtgctcgacaactcagcaagttgaaacgctttcttaccactctgcaacagtttggcaatgacatctcccctgagattggggagaaggtgcggactcttgttcttgcactggtgaactcaacagtgacaattgaggagttccactgtaagctccaagaagccacaaactttccccttcgtccttttgtgattccatttctcaaggccaacctgcccctgctgcagcgggaactgctgcactgcgctcgggcggccaagcagaccccatcccagtacctggctcagcacgaacaccttctgctcaacacaagcattgcatcgcctgctgactcgtcagagttgctcatggaggtgcacggaaatgggaagaggcccagtccagagaggagagaagagaatagttttgatagagacacaattgctcctgagcctcctgccaagagagtatgtaccatcagccctgctcctcggcacagtcctgctctcactgtgcccctcatgaatcccgggggccaattccatcctacccctccacctcttcagcattacaccttagaggatattgcaacttctcacctgtatcgggaacccaacaagatgctagagcatcgagaagttcgtgatagacaccacagtcttggtctaaatggaggctatcaagatgagttggtagatcatcgtttgacagaaagggaatgggctgatgaatggaaacatcttgaccatgcgctgaattgcattatggaaatggtagagaaaacaaggcgctctatggcagttctgcggcgctgtcaggaatcagatcgtgaagaactcaactactggaaaagacggtacaatgaaaacacagagctgaggaaaacggggaccgagttggtctccaggcagcacagccctgggagtgcagattctctcagcaatgattctcagagagagttcaacagcaggccaggtacaggatacgtacctgtggagttttggaagaaaacagaagaagctgtgaataaggtgaaaattcaggccatgtcagaagtacagaaggccgtcgctgaggcagagcagaaagcctttgaagtgattgcaacagagagagcacgaatggagcaaaccatagcggatgtcaagcggcaggccgcagaggatgctttcctcgtcatcaatgagcaagaggagtccacggagaactgctggaactgtggccgcaaagccagcgagacatgcagtggctgcaatatcgcgcgatactgtggctctttctgccagcacaaggactgggagcggcaccaccgcctctgtggtcagaacctgcatggccagagcccccacggccagggccggccgctgcttcctgtaggcaggggctcctctgccaggtccgccgactgcagcgtgcccagcccagccctcgacaagacctcggcaaccacatcgcgttcctcaacacctgcttctgtgacagctatcgacaccaacggactctgatgatgaggactagtccctgttcccagagcccacttttttttctttttttgaaataaaatagcctgtctttcagatctcaaaggctcttttcagagccaccaaaaaaaaaaaaaaaaaaaaaaaaaaaaaaaaaaaaaaaaaaaaaaaaaaaaaaaaaaaaaaaaaaaaaaaaaaaaaaaaaaaaaaaaaaaaaaaaaaaaagaatt

SEQ ID NO: 1267 - RNA, 2761 nt, synthetic construct
  misc_feature 1..2761: note = Artificial____RUNX1(1-241)_I_RUNX1T1b(22-604) mRNA wt mod
  source 1..2761: mol_type = other RNA
aggagagtcccgcagtcggcgtccagcggctctgcttgttcgtgtgtgtgtcgttgcaggccttattcaagcttaccatgcgtatccccgtagatgccagcacgagccgccgcttcacgccgccttccaccgcgctgagcccaggcaagatgagcgaggcgttgccgctgggcgccccggacgccggcgctgccctggccggcaagctgaggagcggcgaccgcagcatggtggaggtgctggccgaccacccgggcgagctggtgcgcaccgacagccccaacttcctctgctccgtgctgcctacgcactggcgctgcaacaagaccctgcccatcgctttcaaggtggtggccctaggggatgttccagatggcactctggtcactgtgatggctggcaatgatgaaaactactcggctgagctgagaaatgctaccgcagccatgaagaaccaggttgcaagatttaatgacctcaggtttgtcggtcgaagtggaagagggaaaagtttcactctgaccatcactgtcttcacaaacccaccgcaagtcgccacctaccacagagccatcaaaatcacagtggatgggccccgagaacctcgaagacatcggcagaaactagatgatcagaccaagcccgggagcttgtccttttccgagcggctcagtgaactggagcagctgcggcgcacagccatgagggtcagcccacaccacccagcccccacgcccaaccctcgtgcctccctgaaccactccactgcctttaaccctcagcctcagagtcagatgcagatcggtcctgagaaaagggtgccagcgatgcctggatcgcctgtggaagtgaagatacagtccagatcctcacctcccaccatgccacccctcccaccaataaatcctggaggaccgaggccagtgtccttcactcctactgcattaagcaatggcatcaaccattctcctcctaccctgaatggtgccccatcaccgccacagagattcagcaatggtcctgcctcctccacatcatctgcactcacaaatcagcaattgccagccacttgtggtgctcgacaactcagcaagttgaaacgctttcttaccactctgcaacagtttggcaatgacatctcccctgagattggggagaaggtgcggactcttgttcttgcactggtgaactcaacagtgacaattgaggagttccactgtaagctccaagaagccacaaactttccccttcgtccttttgtgattccatttctcaaggccaacctgcccctgctgcagcgggaactgctgcactgcgctcgggcggccaagcagaccccatcccagtacctggctcagcacgaacaccttctgctcaacacaagcattgcatcgcctgctgactcgtcagagttgctcatggaggtgcacggaaatgggaagaggcccagtccagagaggagagaagagaatagttttgatagagacacaattgctcctgagcctcctgccaagagagtatgtaccatcagccctgctcctcggcacagtcctgctctcactgtgcccctcatgaatcccgggggccaattccatcctacccctccacctcttcagcattacaccttagaggatattgcaacttctcacctgtatcgggaacccaacaagatgctagagcatcgagaagttcgtgatagacaccacagtcttggtctaaatggaggctatcaagatgagttggtagatcatcgtttgacagaaagggaatgggctgatgaatggaaacatcttgaccatgcgctgaattgcattatggaaatggtagagaaaacaaggcgctctatggcagttctgcggcgctgtcaggaatcagatcgtgaagaactcaactactggaaaagacggtacaatgaaaacacagagctgaggaaaacggggaccgagttggtctccaggcagcacagccctgggagtgcagattctctcagcaatgattctcagagagagttcaacagcaggccaggtacaggatacgtacctgtggagttttggaagaaaacagaagaagctgtgaataaggtgaaaattcaggccatgtcagaagtacagaaggccgtcgctgaggcagagcagaaagcctttgaagtgattgcaacagagagagcacgaatggagcaaaccatagcggatgtcaagcggcaggccgcagaggatgctttcctcgtcatcaatgagcaagaggagtccacggagaactgctggaactgtggccgcaaagccagcgagacatgcagtggctgcaatatcgcgcgatactgtggctctttctgccagcacaaggactgggagcggcaccaccgcctctgtggtcagaacctgcatggccagagcccccacggccagggccggccgctgcttcctgtaggcaggggctcctctgccaggtccgccgactgcagcgtgcccagcccagccctcgacaagacctcggcaaccacatcgcgttcctcaacacctgcttctgtgacagctatcgacaccaacggactctgatgatgaggactagtccctgttcccagagcccacttttttttctttttttgaaataaaatagcctgtctttcagatctcaaaggctcttttcagagccaccaaaaaaaaaaaaaaaaaaaaaaaaaaaaaaaaaaaaaaaaaaaaaaaaaaaaaaaaaaaaaaaaaaaaaaaaaaaaaaaaaaaaaaaaaaaaaaaaaaaaagaatt

SEQ ID NO: 1268 - RNA, 1645 nt, synthetic construct
  misc_feature 1..1645: note = Homo sapiens__Q01196-1__RUNX1(K83E_R174Q) mRNA opt1
  source 1..1645: mol_type = other RNA
aggagagtcccgcagtcggcgtccagcggctctgcttgttcgtgtgtgtgtcgttgcaggccttattcaagcttaccatgcgcatccccgtggacgccagcacctcccggcgcttcaccccgcccagcacggccctgtcccccggcaagatgagcgaggcgctccccctgggggccccggacgccggcgccgccctggcggggaagctccggtccggcgaccgcagcatggtcgaggtgctggccgaccaccccggggagctggtgcggaccgactcccccaacttcctctgcagcgtcctgcccacccactggcgctgcaacgagaccctgccgatcgccttcaaggtggtggccctcggcgacgtccccgacggcacgctggtgaccgtgatggcggggaacgacgagaactactccgccgagctgcggaacgccaccgccgccatgaagaaccaggtcgcgcgcttcaacgacctccggttcgtgggccgcagcgggcggggcaagtccttcaccctgacgatcaccgtgttcaccaacccgccccaggtcgccacctaccaccgcgccatcaagatcacggtggacgggccccaggagccccgccggcaccgccagaagctggacgaccagaccaagcccggcagcctctccttcagcgagcggctgtccgagctggagcagctccgccggaccgccatgcgcgtgagcccccaccacccggcccccacccccaacccccgggcgtccctgaaccacagcacggccttcaacccgcagccccagtcccagatgcaggacacccgccagatccagcccagcccgccctggagctacgaccagtcctaccagtacctgggcagcatcgcctcccccagcgtccaccccgccacccccatctccccggggcgcgccagcggcatgaccacgctctccgcggagctgagctcccggctgagcaccgcccccgacctcaccgccttctccgacccccgccagttcccggccctgcccagcatctccgacccccggatgcactaccccggggccttcacctacagcccgacgcccgtgacctccggcatcggcatcgggatgagcgcgatgggctccgccacccgctaccacacctacctgcccccgccctaccccgggagctcccaggcccagggcgggcccttccaggccagcagcccctcctaccacctctactacggcgcgagcgccggctcctaccagttcagcatggtcgggggcgagcggtccccgccccgcatcctgccgccctgcacgaacgccagcaccgggtccgccctgctcaaccccagcctgcccaaccagtccgacgtggtggaggccgagggcagccactccaacagccccaccaacatggcgccctccgcccggctggaggaggccgtgtggcgcccgtactgatgatgaggactagtccctgttcccagagcccacttttttttctttttttgaaataaaatagcctgtctttcagatctcaaaggctcttttcagagccaccaaaaaaaaaaaaaaaaaaaaaaaaaaaaaaaaaaaaaaaaaaaaaaaaaaaaaaaaaaaaaaaaaaaaaaaaaaaaaaaaaaaaaaaaaaaaaaaaaaaaagaatt

SEQ ID NO: 1269 - RNA, 2119 nt, synthetic construct
  misc_feature 1..2119: note = Homo sapiens____CBFbeta(1-165)_SMMHC(1527-1972) mRNA opt1
  source 1..2119: mol_type = other RNA
aggagagtcccgcagtcggcgtccagcggctctgcttgttcgtgtgtgtgtcgttgcaggccttattcaagcttaccatgccccgcgtggtcccggaccagcggagcaagttcgagaacgaggagttcttccgcaagctgtcccgggagtgcgagatcaagtacaccggcttccgcgaccggccccacgaggagcgccaggcccggttccagaacgcctgccgcgacgggcggagcgagatcgcgttcgtggccaccggcacgaacctctccctgcagttcttccccgccagctggcagggggagcagcgccagaccccctcccgggagtacgtggacctggagcgcgaggccggcaaggtctacctcaaggccccgatgatcctgaacggggtgtgcgtgatctggaagggctggatcgacctgcagcggctcgacggcatggggtgcctggagttcgacgaggagcgcgcgcagcaggaggacgccctggcccagcaggccttcgaggaggcgcggcgccggacccgcgagttcgaggaccgggaccgcagccaccgggaggagatggaggtgcacgagctggagaagtccaagcgcgccctcgagacccagatggaggagatgaagacccagctggaggagctggaggacgagctccaggccacggaggacgcgaagctgcggctggaggtcaacatgcaggccctcaagggccagttcgagcgcgacctgcaggcccgggacgagcagaacgaggagaagcgccggcagctgcagcgccagctccacgagtacgagaccgagctggaggacgagcggaagcagcgcgccctggccgcggccgccaagaagaagctcgagggggacctgaaggacctggagctccaggccgacagcgcgatcaagggccgggaggaggccatcaagcagctgcgcaagctgcaggcccagatgaaggacttccagcgggagctcgaggacgcccgcgccagccgggacgagatcttcgcgaccgccaaggagaacgagaagaaggccaagtccctggaggccgacctgatgcagctccaggaggacctggccgcggccgagcgcgcccggaagcaggccgacctggagaaggaggagctcgccgaggagctggcgagctccctgagcgggcgcaacgccctccaggacgagaagcggcgcctggaggcccggatcgcccagctggaggaggagctcgaggaggagcagggcaacatggaggccatgtccgaccgcgtgcggaaggcgacccagcaggccgagcagctgagcaacgagctggccacggagcgctccaccgcccagaagaacgagagcgcgcgccagcagctcgagcggcagaacaaggagctgcgctccaagctgcacgagatggagggggccgtgaagtccaagttcaagagcaccatcgccgccctcgaggccaagatcgcgcagctggaggagcaggtcgagcaggaggcccgggagaagcaggccgccaccaagagcctgaagcagaaggacaagaagctcaaggagatcctgctccaggtggaggacgagcgcaagatggccgagcagtacaaggagcaggcggagaagggcaacgcccgggtgaagcagctgaagcgccagctggaggaggccgaggaggagtcccagcggatcaacgccaaccgccggaagctgcagcgcgagctcgacgaggccacggagagcaacgaggcgatgggccgggaggtcaacgccctgaagtccaagctgcgccgggggaacgagaccagcttcgtgccctcccgccggagcggcgggcgccgggtgatcgagaacgccgacggcagcgaggaggagaccgacacccgcgacgccgacttcaacgggacgaaggcgtccgagtgatgatgaggactagtccctgttcccagagcccacttttttttctttttttgaaataaaatagcctgtctttcagatctcaaaggctcttttcagagccaccaaaaaaaaaaaaaaaaaaaaaaaaaaaaaaaaaaaaaaaaaaaaaaaaaaaaaaaaaaaaaaaaaaaaaaaaaaaaaaaaaaaaaaaaaaaaaaaaaaaaagaatt

SEQ ID NO: 1270 - RNA, 1834 nt, synthetic construct
  misc_feature 1..1834: note = Artificial____CBFbeta(1-165)_SMMHC(1527-1877) mRNA opt1
  source 1..1834: mol_type = other RNA
aggagagtcccgcagtcggcgtccagcggctctgcttgttcgtgtgtgtgtcgttgcaggccttattcaagcttaccatgccccgcgtggtcccggaccagcggagcaagttcgagaacgaggagttcttccgcaagctgtcccgggagtgcgagatcaagtacaccggcttccgcgaccggccccacgaggagcgccaggcccggttccagaacgcctgccgcgacgggcggagcgagatcgcgttcgtggccaccggcacgaacctctccctgcagttcttccccgccagctggcagggggagcagcgccagaccccctcccgggagtacgtggacctggagcgcgaggccggcaaggtctacctcaaggccccgatgatcctgaacggggtgtgcgtgatctggaagggctggatcgacctgcagcggctcgacggcatggggtgcctggagttcgacgaggagcgcgcgcagcaggaggacgccctggcccagcaggccttcgaggaggcgcggcgccggacccgcgagttcgaggaccgggaccgcagccaccgggaggagatggaggtgcacgagctggagaagtccaagcgcgccctcgagacccagatggaggagatgaagacccagctggaggagctggaggacgagctccaggccacggaggacgcgaagctgcggctggaggtcaacatgcaggccctcaagggccagttcgagcgcgacctgcaggcccgggacgagcagaacgaggagaagcgccggcagctgcagcgccagctccacgagtacgagaccgagctggaggacgagcggaagcagcgcgccctggccgcggccgccaagaagaagctcgagggggacctgaaggacctggagctccaggccgacagcgcgatcaagggccgggaggaggccatcaagcagctgcgcaagctgcaggcccagatgaaggacttccagcgggagctcgaggacgcccgcgccagccgggacgagatcttcgcgaccgccaaggagaacgagaagaaggccaagtccctggaggccgacctgatgcagctccaggaggacctggccgcggccgagcgcgcccggaagcaggccgacctggagaaggaggagctcgccgaggagctggcgagctccctgagcgggcgcaacgccctccaggacgagaagcggcgcctggaggcccggatcgcccagctggaggaggagctcgaggaggagcagggcaacatggaggccatgtccgaccgcgtgcggaaggcgacccagcaggccgagcagctgagcaacgagctggccacggagcgctccaccgcccagaagaacgagagcgcgcgccagcagctcgagcggcagaacaaggagctgcgctccaagctgcacgagatggagggggccgtgaagtccaagttcaagagcaccatcgccgccctcgaggccaagatcgcgcagctggaggagcaggtcgagcaggaggcccgggagaagcaggccgccaccaagagcctgaagcagaaggacaagaagctcaaggagatcctgctccaggtggaggacgagcgcaagatggccgagcagtacaaggagcaggcggagaagggcaacgcctgatgatgaggactagtccctgttcccagagcccacttttttttctttttttgaaataaaatagcctgtctttcagatctcaaaggctcttttcagagccaccaaaaaaaaaaaaaaaaaaaaaaaaaaaaaaaaaaaaaaaaaaaaaaaaaaaaaaaaaaaaaaaaaaaaaaaaaaaaaaaaaaaaaaaaaaaaaaaaaaaaagaatt

SEQ ID NO: 1271 - RNA, 895 nt, synthetic construct
  misc_feature 1..895: note = Artificial____CBFbeta(1-165)_Linker_Lifeact mRNA opt1
  source 1..895: mol_type = other RNA
aggagagtcccgcagtcggcgtccagcggctctgcttgttcgtgtgtgtgtcgttgcaggccttattcaagcttaccatgccccgcgtggtcccggaccagcggagcaagttcgagaacgaggagttcttccgcaagctgtcccgggagtgcgagatcaagtacaccggcttccgcgaccggccccacgaggagcgccaggcccggttccagaacgcctgccgcgacgggcggagcgagatcgcgttcgtggccaccggcacgaacctctccctgcagttcttccccgccagctggcagggggagcagcgccagaccccctcccgggagtacgtggacctggagcgcgaggccggcaaggtctacctcaaggccccgatgatcctgaacggggtgtgcgtgatctggaagggctggatcgacctgcagcggctcgacggcatggggtgcctggagttcgacgaggagcgcgcgcagcaggaggacgccctggcccagcaggccttcgaggaggcgcggcgccggacccgcgagttcgaggaccgggaccgcagccaccgggaggagatggagggcgggagcggcgggtccggcgggagcggcggctccgggggcgggggcgtggccgacctgatcaagaagttcgagagcatctccaaggaggagggggacccgcccgtcgccacctgatgatgaggactagtccctgttcccagagcccacttttttttctttttttgaaataaaatagcctgtctttcagatctcaaaggctcttttcagagccaccaaaaaaaaaaaaaaaaaaaaaaaaaaaaaaaaaaaaaaaaaaaaaaaaaaaaaaaaaaaaaaaaaaaaaaaaaaaaaaaaaaaaaaaaaaaaaaaaaaaaagaatt

SEQ ID NO: 1272 - RNA, 862 nt, synthetic construct
  misc_feature 1..862: note = Artificial____CBFbeta(1-165)_HIF1alpha(549-575) mRNA opt1
  source 1..862: mol_type = other RNA
aggagagtcccgcagtcggcgtccagcggctctgcttgttcgtgtgtgtgtcgttgcaggccttattcaagcttaccatgccccgcgtggtcccggaccagcggagcaagttcgagaacgaggagttcttccgcaagctgtcccgggagtgcgagatcaagtacaccggcttccgcgaccggccccacgaggagcgccaggcccggttccagaacgcctgccgcgacgggcggagcgagatcgcgttcgtggccaccggcacgaacctctccctgcagttcttccccgccagctggcagggggagcagcgccagaccccctcccgggagtacgtggacctggagcgcgaggccggcaaggtctacctcaaggccccgatgatcctgaacggggtgtgcgtgatctggaagggctggatcgacctgcagcggctcgacggcatggggtgcctggagttcgacgaggagcgcgcgcagcaggaggacgccctggcccagcaggccttcgaggaggcgcggcgccggacccgcgagttcgaggaccgggaccgcagccaccgggaggagatggagcccttcagcacccaggacaccgacctggacctcgagatgctggccccgtacatccccatggacgacgacttccagctgcgctgatgatgaggactagtccctgttcccagagcccacttttttttctttttttgaaataaaatagcctgtctttcagatctcaaaggctcttttcagagccaccaaaaaaaaaaaaaaaaaaaaaaaaaaaaaaaaaaaaaaaaaaaaaaaaaaaaaaaaaaaaaaaaaaaaaaaaaaaaaaaaaaaaaaaaaaaaaaaaaaaaagaatt

SEQ ID NO: 1273 - RNA, 907 nt, synthetic construct
  misc_feature 1..907: note Artificial____CBFbeta(1-165)_Linker_HIF1alpha(549-575) mRNA opt1
  source 1..907: mol_type = other RNA
aggagagtcccgcagtcggcgtccagcggctctgcttgttcgtgtgtgtgtcgttgcaggccttattcaagcttaccatgccccgcgtggtcccggaccagcggagcaagttcgagaacgaggagttcttccgcaagctgtcccgggagtgcgagatcaagtacaccggcttccgcgaccggccccacgaggagcgccaggcccggttccagaacgcctgccgcgacgggcggagcgagatcgcgttcgtggccaccggcacgaacctctccctgcagttcttccccgccagctggcagggggagcagcgccagaccccctcccgggagtacgtggacctggagcgcgaggccggcaaggtctacctcaaggccccgatgatcctgaacggggtgtgcgtgatctggaagggctggatcgacctgcagcggctcgacggcatggggtgcctggagttcgacgaggagcgcgcgcagcaggaggacgccctggcccagcaggccttcgaggaggcgcggcgccggacccgcgagttcgaggaccgggaccgcagccaccgggaggagatggagggcgggagcggcgggtccggcgggagcggcggctccgggggcgggcccttcagcacccaggacaccgacctggacctcgagatgctggccccgtacatccccatggacgacgacttccagctgcgctgatgatgaggactagtccctgttcccagagcccacttttttttctttttttgaaataaaatagcctgtctttcagatctcaaaggctcttttcagagccaccaaaaaaaaaaaaaaaaaaaaaaaaaaaaaaaaaaaaaaaaaaaaaaaaaaaaaaaaaaaaaaaaaaaaaaaaaaaaaaaaaaaaaaaaaaaaaaaaaaaaagaatt

SEQ ID NO: 1274 - RNA, 2542 nt, synthetic construct
  misc_feature 1..2542: note = Artificial____RUNX1(1-177)_N_RUNX1T1a(31-604) mRNA opt1
  source 1..2542: mol_type = other RNA
aggagagtcccgcagtcggcgtccagcggctctgcttgttcgtgtgtgtgtcgttgcaggccttattcaagcttaccatgcgcatccccgtggacgccagcacctcccggcgcttcaccccgcccagcacggccctgtcccccggcaagatgagcgaggcgctccccctgggggccccggacgccggcgccgccctggcggggaagctccggtccggcgaccgcagcatggtcgaggtgctggccgaccaccccggggagctggtgcggaccgactcccccaacttcctctgcagcgtcctgcccacccactggcgctgcaacaagaccctgccgatcgccttcaaggtggtggccctcggcgacgtccccgacggcacgctggtgaccgtgatggcggggaacgacgagaactactccgccgagctgcggaacgccaccgccgccatgaagaaccaggtcgcgcgcttcaacgacctccggttcgtgggccgcagcgggcggggcaagtccttcaccctgacgatcaccgtgttcaccaacccgccccaggtcgccacctaccaccgcgccatcaagatcacggtggacgggccccgggagccccgcaaccggaccgagaagcacagcacgatgcccgactccccggtggacgtgaagacccagagccgcctgaccccgcccaccatgcccccgccgcccacgacccagggcgcgccccggacctccagcttcacccccacgaccctgaccaacgggacctcccacagccccacggccctcaacggcgccccctccccgcccaacgggttcagcaacggcccctccagctccagctccagctccctggccaaccagcagctgccgcccgcctgcggcgcccgccagctcagcaagctgaagcggttcctgaccaccctccagcagttcgggaacgacatctcccccgagatcggcgagcgcgtccggaccctggtgctggggctcgtgaacagcacgctgaccatcgaggagttccacagcaagctgcaggaggcgaccaacttccccctccgccccttcgtcatccccttcctgaaggccaacctgcccctcctgcagcgggagctgctccactgcgcccgcctggccaagcagaaccccgcgcagtacctggcccagcacgagcagctcctgctggacgcctccaccacgagccccgtggactccagcgagctcctgctggacgtgaacgagaacggcaagcggcgcacccccgaccggaccaaggagaacgggttcgaccgcgagccgctccactccgagcaccccagcaagcggccctgcaccatctcccccggccagcgctacagcccgaacaacggcctgtcctaccagcccaacgggctgccccacccgacgcccccgccgccccagcactaccggctcgacgacatggccatcgcccaccactaccgcgacagctaccggcacccctcccaccgcgacctgcgcgaccggaaccgccccatgggcctgcacgggacccggcaggaggagatgatcgaccaccgcctcaccgaccgggagtgggcggaggagtggaagcacctggaccacctcctgaactgcatcatggacatggtcgagaagacccgccggagcctgacggtgctgcgccggtgccaggaggccgaccgcgaggagctcaactactggatccggcgctactccgacgccgaggacctgaagaagggcggcgggagctccagctcccacagccggcagcagtcccccgtgaaccccgaccccgtcgccctggacgcccaccgcgagttcctccaccggcccgcgagcggctacgtgcccgaggagatctggaagaaggccgaggaggccgtgaacgaggtcaagcgccaggccatgaccgagctgcagaaggccgtgagcgaggcggagcggaaggcccacgacatgatcaccaccgagcgcgccaagatggagcggacggtggccgaggccaagcgccaggcggccgaggacgccctggccgtcatcaaccagcaggaggactccagcgagtcctgctggaactgcgggcgcaaggcgagcgagacctgctccggctgcaacaccgcccggtactgcgggagcttctgccagcacaaggactgggagaagcaccaccacatctgcggccagaccctgcaggcccagcagcagggcgacacgccggccgtgtccagctccgtgacccccaacagcggggccggctcccccatggacacgcccccggcggccacgccccgcagcaccacccccgggaccccctccaccatcgagaccaccccgcggtgatgatgaggactagtccctgttcccagagcccacttttttttctttttttgaaataaaatagcctgtctttcagatctcaaaggctcttttcagagccaccaaaaaaaaaaaaaaaaaaaaaaaaaaaaaaaaaaaaaaaaaaaaaaaaaaaaaaaaaaaaaaaaaaaaaaaaaaaaaaaaaaaaaaaaaaaaaaaaaaaaagaatt

SEQ ID NO: 1275 - RNA, 1057 nt, synthetic construct
  misc_feature 1..1057: note = Artificial____RUNX1(1-241)_RUNX1T1b(short) mRNA opt1
  source 1..1057: mol_type = other RNA
aggagagtcccgcagtcggcgtccagcggctctgcttgttcgtgtgtgtgtcgttgcaggccttattcaagcttaccatgcgcatccccgtggacgccagcacctcccggcgcttcaccccgcccagcacggccctgtcccccggcaagatgagcgaggcgctccccctgggggccccggacgccggcgccgccctggcggggaagctccggtccggcgaccgcagcatggtcgaggtgctggccgaccaccccggggagctggtgcggaccgactcccccaacttcctctgcagcgtcctgcccacccactggcgctgcaacaagaccctgccgatcgccttcaaggtggtggccctcggcgacgtccccgacggcacgctggtgaccgtgatggcggggaacgacgagaactactccgccgagctgcggaacgccaccgccgccatgaagaaccaggtcgcgcgcttcaacgacctccggttcgtgggccgcagcgggcggggcaagtccttcaccctgacgatcaccgtgttcaccaacccgccccaggtcgccacctaccaccgcgccatcaagatcacggtggacgggccccgggagccccgccggcaccgccagaagctggacgaccagaccaagcccggcagcctctccttcagcgagcggctgtccgagctggagcagctccgccggaccgccatgcgcgtgagcccccaccacccggcccccacccccaacccccgggcgtccctgaaccacagcacggccttcaacccgcagccccagtcccagatgcaggaggtgggcttctgccacgtcgcccaggtggggctgaagctcctgggctgatgatgaggactagtccctgttcccagagcccacttttttttctttttttgaaataaaatagcctgtctttcagatctcaaaggctcttttcagagccaccaaaaaaaaaaaaaaaaaaaaaaaaaaaaaaaaaaaaaaaaaaaaaaaaaaaaaaaaaaaaaaaaaaaaaaaaaaaaaaaaaaaaaaaaaaaaaaaaaaaaagaatt

SEQ ID NO: 1276 - RNA, 2761 nt, synthetic construct
  misc_feature 1..2761: note = Artificial____RUNX1(1-241)_V_RUNX1T1b(22-604) mRNA opt1
  source 1..2761: mol_type = other RNA
aggagagtcccgcagtcggcgtccagcggctctgcttgttcgtgtgtgtgtcgttgcaggccttattcaagcttaccatgcgcatccccgtggacgccagcacctcccggcgcttcaccccgcccagcacggccctgtcccccggcaagatgagcgaggcgctccccctgggggccccggacgccggcgccgccctggcggggaagctccggtccggcgaccgcagcatggtcgaggtgctggccgaccaccccggggagctggtgcggaccgactcccccaacttcctctgcagcgtcctgcccacccactggcgctgcaacaagaccctgccgatcgccttcaaggtggtggccctcggcgacgtccccgacggcacgctggtgaccgtgatggcggggaacgacgagaactactccgccgagctgcggaacgccaccgccgccatgaagaaccaggtcgcgcgcttcaacgacctccggttcgtgggccgcagcgggcggggcaagtccttcaccctgacgatcaccgtgttcaccaacccgccccaggtcgccacctaccaccgcgccatcaagatcacggtggacgggccccgggagccccgccggcaccgccagaagctggacgaccagaccaagcccggcagcctctccttcagcgagcggctgtccgagctggagcagctccgccggaccgccatgcgcgtgagcccccaccacccggcccccacccccaacccccgggcgtccctgaaccacagcacggccttcaacccgcagccccagtcccagatgcaggtggggcccgagaagcgggtgccggcgatgcccggcagccccgtggaggtcaagatccagtcccgcagctccccgcccaccatgccgcccctgccgcccatcaaccccgggggcccccggcccgtgagcttcacccccacggccctgtccaacgggatcaaccactccccgcccaccctcaacggcgcccccagcccgccccagcgcttcagcaacggccccgcctccagcacctccagcgccctgaccaaccagcagctgcccgcgacgtgcggggcccggcagctctccaagctgaagcgcttcctgaccaccctccagcagttcggcaacgacatcagccccgagatcggggagaaggtgcggaccctggtcctggccctcgtgaactccacggtgaccatcgaggagttccactgcaagctgcaggaggccaccaacttccccctgcgccccttcgtcatccccttcctcaaggcgaacctgccgctgctccagcgggagctgctgcactgcgcccgcgccgccaagcagacccccagccagtacctcgcccagcacgagcacctcctgctgaacacgtccatcgcgagccccgccgacagctccgagctgctgatggaggtgcacggcaacgggaagcggcccagcccggagcgccgggaggagaactccttcgaccgcgacaccatcgcccccgagcccccggccaagcgggtgtgcaccatcagccccgcgccccgccactcccccgccctcaccgtcccgctgatgaaccccggcggccagttccaccccacgcccccgcccctgcagcactacaccctcgaggacatcgccaccagccacctgtaccgggagcccaacaagatgctggagcaccgcgaggtgcgggaccgccaccactccctcgggctgaacggcgggtaccaggacgagctggtggaccaccggctcaccgagcgcgagtgggccgacgagtggaagcacctggaccacgccctgaactgcatcatggagatggtcgagaagacgcgccggagcatggccgtgctccgccggtgccaggagtccgaccgcgaggagctgaactactggaagcggcgctacaacgagaacaccgagctgcggaagaccggcaccgagctcgtgagccgccagcactcccccggcagcgcggactccctgagcaacgactcccagcgggagttcaacagccgcccggggacgggctacgtccccgtggagttctggaagaagaccgaggaggccgtgaacaaggtcaagatccaggccatgtccgaggtgcagaaggccgtggccgaggcggagcagaaggccttcgaggtcatcgccaccgagcgggcccgcatggagcagaccatcgcggacgtgaagcggcaggccgccgaggacgccttcctggtcatcaacgagcaggaggagagcacggagaactgctggaactgcgggcgcaaggcctccgagacctgcagcggctgcaacatcgcgcggtactgcgggagcttctgccagcacaaggactgggagcgccaccaccggctctgcggccagaacctgcacggccagtccccgcacgggcagggccgccccctgctgcccgtggggcggggcagctccgcccgcagcgccgactgctccgtgcccagccccgccctcgacaagacctccgccaccacgagccgctccagcacccccgcgtccgtcaccgccatcgacaccaacgggctgtgatgatgaggactagtccctgttcccagagcccacttttttttctttttttgaaataaaatagcctgtctttcagatctcaaaggctcttttcagagccaccaaaaaaaaaaaaaaaaaaaaaaaaaaaaaaaaaaaaaaaaaaaaaaaaaaaaaaaaaaaaaaaaaaaaaaaaaaaaaaaaaaaaaaaaaaaaaaaaaaaaagaatt

SEQ ID NO: 1277 - RNA, 2761 nt, synthetic construct
  misc_feature 1..2761: note = Artificial____RUNX1(1-241)_I_RUNX1T1b(22-604) mRNA opt1
  source 1..2761: mol_type = other RNA
aggagagtcccgcagtcggcgtccagcggctctgcttgttcgtgtgtgtgtcgttgcaggccttattcaagcttaccatgcgcatccccgtggacgccagcacctcccggcgcttcaccccgcccagcacggccctgtcccccggcaagatgagcgaggcgctccccctgggggccccggacgccggcgccgccctggcggggaagctccggtccggcgaccgcagcatggtcgaggtgctggccgaccaccccggggagctggtgcggaccgactcccccaacttcctctgcagcgtcctgcccacccactggcgctgcaacaagaccctgccgatcgccttcaaggtggtggccctcggcgacgtccccgacggcacgctggtgaccgtgatggcggggaacgacgagaactactccgccgagctgcggaacgccaccgccgccatgaagaaccaggtcgcgcgcttcaacgacctccggttcgtgggccgcagcgggcggggcaagtccttcaccctgacgatcaccgtgttcaccaacccgccccaggtcgccacctaccaccgcgccatcaagatcacggtggacgggccccgggagccccgccggcaccgccagaagctggacgaccagaccaagcccggcagcctctccttcagcgagcggctgtccgagctggagcagctccgccggaccgccatgcgcgtgagcccccaccacccggcccccacccccaacccccgggcgtccctgaaccacagcacggccttcaacccgcagccccagtcccagatgcagatcgggcccgagaagcgggtgccggcgatgcccggcagccccgtggaggtcaagatccagtcccgcagctccccgcccaccatgccgcccctgccgcccatcaaccccgggggcccccggcccgtgagcttcacccccacggccctgtccaacgggatcaaccactccccgcccaccctcaacggcgcccccagcccgccccagcgcttcagcaacggccccgcctccagcacctccagcgccctgaccaaccagcagctgcccgcgacgtgcggggcccggcagctctccaagctgaagcgcttcctgaccaccctccagcagttcggcaacgacatcagccccgagatcggggagaaggtgcggaccctggtcctggccctcgtgaactccacggtgaccatcgaggagttccactgcaagctgcaggaggccaccaacttccccctgcgccccttcgtcatccccttcctcaaggcgaacctgccgctgctccagcgggagctgctgcactgcgcccgcgccgccaagcagacccccagccagtacctcgcccagcacgagcacctcctgctgaacacgtccatcgcgagccccgccgacagctccgagctgctgatggaggtgcacggcaacgggaagcggcccagcccggagcgccgggaggagaactccttcgaccgcgacaccatcgcccccgagcccccggccaagcgggtgtgcaccatcagccccgcgccccgccactcccccgccctcaccgtcccgctgatgaaccccggcggccagttccaccccacgcccccgcccctgcagcactacaccctcgaggacatcgccaccagccacctgtaccgggagcccaacaagatgctggagcaccgcgaggtgcgggaccgccaccactccctcgggctgaacggcgggtaccaggacgagctggtggaccaccggctcaccgagcgcgagtgggccgacgagtggaagcacctggaccacgccctgaactgcatcatggagatggtcgagaagacgcgccggagcatggccgtgctccgccggtgccaggagtccgaccgcgaggagctgaactactggaagcggcgctacaacgagaacaccgagctgcggaagaccggcaccgagctcgtgagccgccagcactcccccggcagcgcggactccctgagcaacgactcccagcgggagttcaacagccgcccggggacgggctacgtccccgtggagttctggaagaagaccgaggaggccgtgaacaaggtcaagatccaggccatgtccgaggtgcagaaggccgtggccgaggcggagcagaaggccttcgaggtcatcgccaccgagcgggcccgcatggagcagaccatcgcggacgtgaagcggcaggccgccgaggacgccttcctggtcatcaacgagcaggaggagagcacggagaactgctggaactgcgggcgcaaggcctccgagacctgcagcggctgcaacatcgcgcggtactgcgggagcttctgccagcacaaggactgggagcgccaccaccggctctgcggccagaacctgcacggccagtccccgcacgggcagggccgccccctgctgcccgtggggcggggcagctccgcccgcagcgccgactgctccgtgcccagccccgccctcgacaagacctccgccaccacgagccgctccagcacccccgcgtccgtcaccgccatcgacaccaacgggctgtgatgatgaggactagtccctgttcccagagcccacttttttttctttttttgaaataaaatagcctgtctttcagatctcaaaggctcttttcagagccaccaaaaaaaaaaaaaaaaaaaaaaaaaaaaaaaaaaaaaaaaaaaaaaaaaaaaaaaaaaaaaaaaaaaaaaaaaaaaaaaaaaaaaaaaaaaaaaaaaaaaagaatt

SEQ ID NO: 1278 - RNA, 1645 nt, synthetic construct
  misc_feature 1..1645: note = Homo sapiens__Q01196-1__RUNX1(K83E_R174Q) mRNA opt1
  source 1..1645: mol_type = other RNA
aggagagtcccgcagtcggcgtccagcggctctgcttgttcgtgtgtgtgtcgttgcaggccttattcaagcttaccatgcgcatccccgtggacgccagcacctcccggcgcttcaccccgcccagcacggccctgtcccccggcaagatgagcgaggcgctccccctgggggccccggacgccggcgccgccctggcggggaagctccggtccggcgaccgcagcatggtcgaggtgctggccgaccaccccggggagctggtgcggaccgactcccccaacttcctctgcagcgtcctgcccacccactggcgctgcaacgagaccctgccgatcgccttcaaggtggtggccctcggcgacgtccccgacggcacgctggtgaccgtgatggcggggaacgacgagaactactccgccgagctgcggaacgccaccgccgccatgaagaaccaggtcgcgcgcttcaacgacctccggttcgtgggccgcagcgggcggggcaagtccttcaccctgacgatcaccgtgttcaccaacccgccccaggtcgccacctaccaccgcgccatcaagatcacggtggacgggccccaggagccccggcgccaccggcagaagctggacgaccagaccaagcccggcagcctctccttcagcgagcgcctgtccgagctggagcagctccggcgcaccgccatgcgggtgagcccccaccacccggcccccacccccaacccccgcgcgtccctgaaccacagcacggccttcaacccgcagccccagtcccagatgcaggacacccggcagatccagcccagcccgccctggagctacgaccagtcctaccagtacctgggcagcatcgcctcccccagcgtccaccccgccacccccatctccccggggcgcgccagcggcatgaccacgctctccgcggagctgagctcccgcctgagcaccgcccccgacctcaccgccttctccgacccccggcagttcccggccctgcccagcatctccgacccccgcatgcactaccccggggccttcacctacagcccgacgcccgtgacctccggcatcggcatcgggatgagcgcgatgggctccgccacccggtaccacacctacctgcccccgccctaccccgggagctcccaggcccagggcgggcccttccaggccagcagcccctcctaccacctctactacggcgcgagcgccggctcctaccagttcagcatggtcgggggcgagcgctccccgccccggatcctgccgccctgcacgaacgccagcaccgggtccgccctgctcaaccccagcctgcccaaccagtccgacgtggtggaggccgagggcagccactccaacagccccaccaacatggcgccctccgcccgcctggaggaggccgtgtggcggccgtactgatgatgaggactagtccctgttcccagagcccacttttttttctttttttgaaataaaatagcctgtctttcagatctcaaaggctcttttcagagccaccaaaaaaaaaaaaaaaaaaaaaaaaaaaaaaaaaaaaaaaaaaaaaaaaaaaaaaaaaaaaaaaaaaaaaaaaaaaaaaaaaaaaaaaaaaaaaaaaaaaaagaatt

SEQ ID NO: 1279 - RNA, 2119 nt, synthetic construct
  misc_feature 1..2119: note = Homo sapiens____CBFbeta(1-165)_SMMHC(1527-1972) mRNA opt1
  source 1..2119: mol_type = other RNA
aggagagtcccgcagtcggcgtccagcggctctgcttgttcgtgtgtgtgtcgttgcaggccttattcaagcttaccatgccccgcgtggtcccggaccagcggagcaagttcgagaacgaggagttcttccgcaagctgtcccgggagtgcgagatcaagtacaccggcttccgcgaccggccccacgaggagcgccaggcccggttccagaacgcctgccgcgacgggcggagcgagatcgcgttcgtggccaccggcacgaacctctccctgcagttcttccccgccagctggcagggggagcagcgccagaccccctcccgggagtacgtggacctggagcgcgaggccggcaaggtctacctcaaggccccgatgatcctgaacggggtgtgcgtgatctggaagggctggatcgacctgcagcggctcgacggcatggggtgcctggagttcgacgaggagcgcgcgcagcaggaggacgccctggcccagcaggccttcgaggaggcgcggcgccggacccgcgagttcgaggaccgggaccgcagccaccgggaggagatggaggtccacgagctcgagaagtccaagcgcgccctggagacccagatggaggagatgaagacgcagctggaggagctcgaggacgagctgcaggccaccgaggacgccaagctgcgcctcgaggtgaacatgcaggccctgaagggccagttcgagcgggacctgcaggcgcgcgacgagcagaacgaggagaagcggcgccagctccagcggcagctgcacgagtacgagaccgagctggaggacgagcgcaagcagcgggccctcgccgccgccgcgaagaagaagctggagggggacctgaaggacctcgagctgcaggccgacagcgccatcaagggccgcgaggaggccatcaagcagctgcggaagctccaggcccagatgaaggacttccagcgcgagctggaggacgcgcgggcctcccgcgacgagatcttcgccaccgccaaggagaacgagaagaaggccaagagcctggaggcggacctcatgcagctgcaggaggacctggccgccgccgagcgggcgcgcaagcaggccgacctcgagaaggaggagctggccgaggagctggcctccagcctctccgggcggaacgccctgcaggacgagaagcgccggctggaggcgcgcatcgcccagctcgaggaggagctggaggaggagcagggcaacatggaggccatgagcgaccgggtgcgcaaggccacgcagcaggccgagcagctgtccaacgagctcgcgaccgagcgcagcaccgcccagaagaacgagtccgcccggcagcagctggagcgccagaacaaggagctgcggagcaagctccacgagatggagggcgccgtcaagtccaagttcaagagcaccatcgccgcgctggaggccaagatcgcccagctggaggagcaggtcgagcaggaggcccgcgagaagcaggcggccaccaagagcctgaagcagaaggacaagaagctcaaggagatcctgctccaggtggaggacgagcggaagatggccgagcagtacaaggagcaggccgagaaggggaacgcccgcgtgaagcagctgaagcggcagctggaggaggcggaggaggagtcccagcgcatcaacgccaaccggcgcaagctgcagcgggagctcgacgaggccacggagagcaacgaggccatgggccgcgaggtgaacgccctgaagtccaagctgcggcgcgggaacgagaccagcttcgtgccctcccggcgcagcggcggccggcgcgtcatcgagaacgcggacgggtccgaggaggagaccgacacgcgggacgccgacttcaacggcaccaaggccagcgagtgatgatgaggactagtccctgttcccagagcccacttttttttctttttttgaaataaaatagcctgtctttcagatctcaaaggctcttttcagagccaccaaaaaaaaaaaaaaaaaaaaaaaaaaaaaaaaaaaaaaaaaaaaaaaaaaaaaaaaaaaaaaaaaaaaaaaaaaaaaaaaaaaaaaaaaaaaaaaaaaaaagaatt

SEQ ID NO: 1280 - RNA, 1834 nt, synthetic construct
  misc_feature 1..1834: note = Artificial____CBFbeta(1-165)_SMMHC(1527-1877) mRNA opt1
  source 1..1834: mol_type = other RNA
aggagagtcccgcagtcggcgtccagcggctctgcttgttcgtgtgtgtgtcgttgcaggccttattcaagcttaccatgccccgcgtggtgccggaccagcggagcaagttcgagaacgaggagttcttccgcaagctgtcccgggagtgcgagatcaagtacacgggcttccgcgaccggccccacgaggagcgccaggcccggttccagaacgcctgccgcgacgggcggagcgagatcgcgttcgtggccaccggcacgaacctgtccctgcagttcttccccgccagctggcagggggagcagcgccagaccccctcccgggagtacgtggacctggagcgcgaggccggcaaggtctacctcaaggccccgatgatcctgaacggggtgtgcgtgatctggaagggctggatcgacctgcagcggctcgacggcatggggtgcctggagttcgacgaggagcgcgcgcagcaggaggacgccctggcccagcaggccttcgaggaggcgcggcgccggacccgcgagttcgaggaccgggaccgcagccaccgggaggagatggaggtccacgagctcgagaagtccaagcgcgccctggagacccagatggaggagatgaagacgcagctggaggagctcgaggacgagctgcaggccaccgaggacgccaagctgcgcctcgaggtgaacatgcaggccctgaagggccagttcgagcgggacctgcaggcgcgcgacgagcagaacgaggagaagcggcgccagctccagcggcagctgcacgagtacgagaccgagctggaggacgagcgcaagcagcgggccctcgccgccgccgcgaagaagaagctggagggggacctgaaggacctcgagctgcaggccgacagcgccatcaagggccgcgaggaggccatcaagcagctgcggaagctccaggcccagatgaaggacttccagcgcgagctggaggacgcgcgggcctcccgcgacgagatcttcgccaccgccaaggagaacgagaagaaggccaagagcctggaggcggacctcatgcagctgcaggaggacctggccgccgccgagcgggcgcgcaagcaggccgacctcgagaaggaggagctggccgaggagctggcctccagcctctccgggcggaacgccctgcaggacgagaagcgccggctggaggcgcgcatcgcccagctcgaggaggagctggaggaggagcagggcaacatggaggccatgagcgaccgggtgcgcaaggccacgcagcaggccgagcagctgtccaacgagctcgcgaccgagcgcagcaccgcccagaagaacgagtccgcccggcagcagctggagcgccagaacaaggagctgcggagcaagctccacgagatggagggcgccgtcaagtccaagttcaagagcaccatcgccgcgctggaggccaagatcgcccagctggaggagcaggtcgagcaggaggcccgcgagaagcaggcggccaccaagagcctgaagcagaaggacaagaagctcaaggagatcctgctccaggtggaggacgagcggaagatggccgagcagtacaaggagcaggccgagaaggggaacgcctgatgatgaggactagtccctgttcccagagcccacttttttttctttttttgaaataaaatagcctgtctttcagatctcaaaggctcttttcagagccaccaaaaaaaaaaaaaaaaaaaaaaaaaaaaaaaaaaaaaaaaaaaaaaaaaaaaaaaaaaaaaaaaaaaaaaaaaaaaaaaaaaaaaaaaaaaaaaaaaaaaagaatt

SEQ ID NO: 1281 - RNA, 895 nt, synthetic construct
  misc_feature 1..895: note = Artificial____CBFbeta(1-165)_Linker_Lifeact mRNA opt1
  source 1..895: mol_type = other RNA
aggagagtcccgcagtcggcgtccagcggctctgcttgttcgtgtgtgtgtcgttgcaggccttattcaagcttaccatgccccgcgtggtccccgaccagcggagcaagttcgagaacgaggagttcttccgcaagctgtcccgggagtgcgagatcaagtacaccggcttccgcgaccggccccacgaggagcgccaggcccggttccagaacgcctgccgcgacgggcggagcgagatcgcgttcgtggccaccggcacgaacctctccctgcagttcttccccgccagctggcagggggagcagcgccagaccccctcccgggagtacgtggacctggagcgcgaggccggcaaggtctacctcaaggccccgatgatcctgaacggggtgtgcgtgatctggaagggctggatcgacctgcagcggctcgacggcatggggtgcctggagttcgacgaggagcgcgcgcagcaggaggacgccctggcccagcaggccttcgaggaggcgcggcgccggacccgcgagttcgaggaccgggaccgcagccaccgggaggagatggagggcgggtccggcgggagcggcggctccgggggcagcgggggcggcggggtcgccgacctcatcaagaagttcgagtccatcagcaaggaggagggcgacccgcccgtggccacctgatgatgaggactagtccctgttcccagagcccacttttttttctttttttgaaataaaatagcctgtctttcagatctcaaaggctcttttcagagccaccaaaaaaaaaaaaaaaaaaaaaaaaaaaaaaaaaaaaaaaaaaaaaaaaaaaaaaaaaaaaaaaaaaaaaaaaaaaaaaaaaaaaaaaaaaaaaaaaaaaaagaatt

SEQ ID NO: 1282 - RNA, 862 nt, synthetic construct
  misc_feature 1..862: note = Artificial____CBFbeta(1-165)_HIF1alpha(549-575) mRNA opt1
  source 1..862: mol_type = other RNA
aggagagtcccgcagtcggcgtccagcggctctgcttgttcgtgtgtgtgtcgttgcaggccttattcaagcttaccatgccccgcgtggtcccggaccagcggagcaagttcgagaacgaggagttcttccgcaagctgtcccgggagtgcgagatcaagtacaccggcttccgcgaccggccccacgaggagcgccaggcccggttccagaacgcctgccgcgacgggcggagcgagatcgcgttcgtggccaccggcacgaacctctccctgcagttcttccccgccagctggcagggggagcagcgccagaccccctcccgggagtacgtggacctggagcgcgaggccggcaaggtctacctcaaggccccgatgatcctgaacggggtgtgcgtgatctggaagggctggatcgacctgcagcggctcgacggcatggggtgcctggagttcgacgaggagcgcgcgcagcaggaggacgccctggcccagcaggccttcgaggaggcgcggcgccggacccgcgagttcgaggaccgggaccgcagccaccgggaggagatggagcccttctccacccaggacacggacctcgacctggagatgctggccccctacatccccatggacgacgacttccagctccgctgatgatgaggactagtccctgttcccagagcccacttttttttctttttttgaaataaaatagcctgtctttcagatctcaaaggctcttttcagagccaccaaaaaaaaaaaaaaaaaaaaaaaaaaaaaaaaaaaaaaaaaaaaaaaaaaaaaaaaaaaaaaaaaaaaaaaaaaaaaaaaaaaaaaaaaaaaaaaaaaaaagaatt

SEQ ID NO: 1283 - RNA, 907 nt, synthetic construct
  misc_feature 1..907: note Artificial____CBFbeta(1-165)_Linker_HIF1alpha(549-575) mRNA opt1
  source 1..907: mol_type = other RNA
aggagagtcccgcagtcggcgtccagcggctctgcttgttcgtgtgtgtgtcgttgcaggccttattcaagcttaccatgccccgcgtggtcccggaccagcggagcaagttcgagaacgaggagttcttccgcaagctgtcccgggagtgcgagatcaagtacaccggcttccgcgaccggccccacgaggagcgccaggcccggttccagaacgcctgccgcgacgggcggagcgagatcgcgttcgtggccaccggcacgaacctctccctgcagttcttccccgccagctggcagggggagcagcgccagaccccctcccgggagtacgtggacctggagcgcgaggccggcaaggtctacctcaaggccccgatgatcctgaacggggtgtgcgtgatctggaagggctggatcgacctgcagcggctcgacggcatggggtgcctggagttcgacgaggagcgcgcgcagcaggaggacgccctggcccagcaggccttcgaggaggcgcggcgccggacccgcgagttcgaggaccgggaccgcagccaccgggaggagatggagggcgggtccggcgggagcggcggctccgggggcagcgggggcggccccttctccacccaggacacggacctcgacctggagatgctggccccctacatccccatggacgacgacttccagctccgctgatgatgaggactagtccctgttcccagagcccacttttttttctttttttgaaataaaatagcctgtctttcagatctcaaaggctcttttcagagccaccaaaaaaaaaaaaaaaaaaaaaaaaaaaaaaaaaaaaaaaaaaaaaaaaaaaaaaaaaaaaaaaaaaaaaaaaaaaaaaaaaaaaaaaaaaaaaaaaaaaaagaatt

SEQ ID NO: 1284 - RNA, 2542 nt, synthetic construct
  misc_feature 1..2542: note = Artificial____RUNX1(1-177)_N_RUNX1T1a(31-604) mRNA opt1
  source 1..2542: mol_type = other RNA
aggagagtcccgcagtcggcgtccagcggctctgcttgttcgtgtgtgtgtcgttgcaggccttattcaagcttaccatgcgcatccccgtggacgccagcacctcccggcgcttcaccccgcccagcacggccctgtcccccggcaagatgagcgaggcgctccccctgggggccccggacgccggcgccgccctggcggggaagctccggtccggcgaccgcagcatggtcgaggtgctggccgaccaccccggggagctggtgcggaccgactcccccaacttcctctgcagcgtcctgcccacccactggcgctgcaacaagaccctgccgatcgccttcaaggtggtggccctcggcgacgtccccgacggcacgctggtgaccgtgatggcggggaacgacgagaactactccgccgagctgcggaacgccaccgccgccatgaagaaccaggtcgcgcgcttcaacgacctccggttcgtgggccgcagcgggcggggcaagtccttcaccctgacgatcaccgtgttcaccaaccccccccaggtcgccacctaccaccgcgccatcaagatcacggtggacgggccgcgggagccccgcaaccggaccgagaagcacagcaccatgcccgactcccccgtggacgtcaagacccagagccgcctgacgccgcccaccatgccccccccgcccaccacccagggcgccccccggacgtccagcttcacccccaccaccctcacgaacggcacctcccacagcccgaccgccctgaacggggcgccctccccccccaacggcttcagcaacgggccgagctccagctccagctccagcctggccaaccagcagctcccccccgcctgcggcgcccgccagctgtccaagctgaagcggttcctcaccacgctgcagcagttcggcaacgacatcagcccggagatcggggagcgcgtgcggaccctggtgctcggcctggtcaactccaccctgaccatcgaggagttccacagcaagctccaggaggccacgaacttccccctgcgccccttcgtgatccccttcctgaaggcgaacctcccgctgctgcagcgcgagctcctgcactgcgcccggctggccaagcagaaccccgcccagtacctcgcccagcacgagcagctgctgctcgacgcgtccaccaccagccccgtggactccagcgagctgctgctcgacgtcaacgagaacgggaagcgccggacccccgaccgcacgaaggagaacggcttcgaccgggagccgctgcactccgagcaccccagcaagcgcccctgcaccatctcccccgggcagcggtacagcccgaacaacggcctgtcctaccagcccaacggcctcccccaccccaccccgccccccccccagcactaccgcctggacgacatggccatcgcccaccactaccgggacagctaccgccacccgagccaccgggacctgcgcgaccggaaccgccccatggggctgcacggcacccggcaggaggagatgatcgaccaccgcctcaccgaccgggagtgggccgaggagtggaagcacctggaccacctgctcaactgcatcatggacatggtggagaagacgcgccggtccctgaccgtgctgcgccgctgccaggaggcggaccgggaggagctcaactactggatccgccggtacagcgacgccgaggacctgaagaaggggggcgggtccagctccagccactcccgccagcagagccccgtcaaccccgacccggtggccctggacgcccaccgggagttcctccaccgccccgcctccggctacgtccccgaggagatctggaagaaggcggaggaggccgtgaacgaggtgaagcggcaggccatgaccgagctgcagaaggccgtcagcgaggccgagcgcaaggcgcacgacatgatcaccacggagcgggccaagatggagcgcaccgtggccgaggccaagcggcaggccgcggaggacgccctggccgtgatcaaccagcaggaggactccagcgagtcctgctggaactgcggccgcaaggccagcgagacctgctccgggtgcaacaccgcgcggtactgcggcagcttctgccagcacaaggactgggagaagcaccaccacatctgcgggcagacgctccaggcccagcagcagggcgacaccccggccgtctccagcagcgtgacccccaactccggggccggcagccccatggacacccccccggccgcgacgccccgctccaccacccccggcacccccagcacgatcgagaccaccccgcggtgatgatgaggactagtccctgttcccagagcccacttttttttctttttttgaaataaaatagcctgtctttcagatctcaaaggctcttttcagagccaccaaaaaaaaaaaaaaaaaaaaaaaaaaaaaaaaaaaaaaaaaaaaaaaaaaaaaaaaaaaaaaaaaaaaaaaaaaaaaaaaaaaaaaaaaaaaaaaaaaaaagaatt

SEQ ID NO: 1285 - RNA, 1057 nt, synthetic construct
  misc_feature 1..1057: note = Artificial____RUNX1(1-241)_RUNX1T1b(short) mRNA opt1
  source 1..1057: mol_type = other RNA
aggagagtcccgcagtcggcgtccagcggctctgcttgttcgtgtgtgtgtcgttgcaggccttattcaagcttaccatgcgcatccccgtggacgccagcacctcccggcgcttcaccccgcccagcacggccctgtcccccggcaagatgagcgaggcgctccccctgggggccccggacgccggcgccgccctggcggggaagctccggtccggcgaccgcagcatggtcgaggtgctggccgaccaccccggggagctggtgcggaccgactcccccaacttcctctgcagcgtcctgcccacccactggcgctgcaacaagaccctgccgatcgccttcaaggtggtggccctcggcgacgtccccgacggcacgctggtgaccgtgatggcggggaacgacgagaactactccgccgagctgcggaacgccaccgccgccatgaagaaccaggtcgcgcgcttcaacgacctccggttcgtgggccgcagcgggcggggcaagtccttcaccctgacgatcaccgtgttcaccaacccgccccaggtcgccacctaccaccgcgccatcaagatcacggtggacgggccccgggagccccgccggcaccgccagaagctggacgaccagaccaagcccggcagcctctccttcagcgagcggctgtccgagctggagcagctccgccggaccgccatgcgcgtgagcccccaccacccggcccccacccccaacccccgggcgtccctgaaccacagcacggccttcaacccgcagccccagtcccagatgcaggaggtcggcttctgccacgtggcccaggtggggctgaagctcctgggctgatgatgaggactagtccctgttcccagagcccacttttttttctttttttgaaataaaatagcctgtctttcagatctcaaaggctcttttcagagccaccaaaaaaaaaaaaaaaaaaaaaaaaaaaaaaaaaaaaaaaaaaaaaaaaaaaaaaaaaaaaaaaaaaaaaaaaaaaaaaaaaaaaaaaaaaaaaaaaaaaaagaatt

SEQ ID NO: 1286 - RNA, 2761 nt, synthetic construct
  misc_feature 1..2761: note = Artificial____RUNX1(1-241)_V_RUNX1T1b(22-604) mRNA opt1
  source 1..2761: mol_type = other RNA
aggagagtcccgcagtcggcgtccagcggctctgcttgttcgtgtgtgtgtcgttgcaggccttattcaagcttaccatgcgcatccccgtggacgccagcacctcccggcgcttcaccccgcccagcacggccctgtcccccggcaagatgagcgaggcgctccccctgggggccccggacgccggcgccgccctggcggggaagctccggtccggcgaccgcagcatggtcgaggtgctggccgaccaccccggggagctggtgcggaccgactcccccaacttcctctgcagcgtcctgcccacccactggcgctgcaacaagaccctgccgatcgccttcaaggtggtggccctcggcgacgtccccgacggcacgctggtgaccgtgatggcggggaacgacgagaactactccgccgagctgcggaacgccaccgccgccatgaagaaccaggtcgcgcgcttcaacgacctccggttcgtgggccgcagcgggcggggcaagtccttcaccctgacgatcaccgtgttcaccaacccgccccaggtcgccacctaccaccgcgccatcaagatcacggtggacgggccccgggagccccgccggcaccgccagaagctggacgaccagaccaagcccggcagcctctccttcagcgagcggctgtccgagctggagcagctccgccggaccgccatgcgcgtgagcccccaccacccggcccccacccccaacccccgggcgtccctgaaccacagcacggccttcaacccgcagccccagtcccagatgcaggtcggccccgagaagcgcgtgcccgccatgccggggagccccgtggaggtcaagatccagagccgctccagcccgcccaccatgccgcccctgcccccgatcaaccccggcgggccccggcccgtgtccttcacccccaccgccctcagcaacggcatcaaccactccccgcccacgctgaacggcgcccccagcccgccccagcgcttctccaacgggcccgcgagctccaccagctccgccctgaccaaccagcagctccccgcgacctgcggcgcccggcagctgagcaagctgaagcgcttcctcacgaccctgcagcagttcgggaacgacatctcccccgagatcggcgagaaggtgcggaccctggtcctcgccctggtgaacagcaccgtgacgatcgaggagttccactgcaagctgcaggaggccaccaacttccccctccgccccttcgtcatccccttcctgaaggccaacctgccgctcctgcagcgggagctgctccactgcgcccgcgccgcgaagcagaccccctcccagtacctggcccagcacgagcacctcctgctgaacaccagcatcgcctcccccgccgacagctccgagctgctcatggaggtgcacgggaacggcaagcggcccagcccggagcgccgggaggagaacagcttcgaccgcgacacgatcgcccccgagccgcccgcgaagcgggtctgcaccatctcccccgcgccccgccacagccccgccctgaccgtgccgctgatgaaccccggcgggcagttccaccccacgcccccgcccctgcagcactacaccctcgaggacatcgccacctcccacctgtaccgggagcccaacaagatgctggagcaccgcgaggtgcgggaccgccaccacagcctcggcctgaacgggggctaccaggacgagctggtcgaccaccggctcaccgagcgcgagtgggccgacgagtggaagcacctggaccacgccctgaactgcatcatggagatggtggagaagacccgccggtccatggccgtgctccgccggtgccaggagagcgaccgcgaggagctgaactactggaagcggcgctacaacgagaacaccgagctgcggaagacggggaccgagctcgtctcccgccagcacagccccggctccgccgacagcctgtccaacgacagccagcgggagttcaactcccgcccgggcaccgggtacgtgcccgtggagttctggaagaagaccgaggaggccgtcaacaaggtgaagatccaggccatgagcgaggtgcagaaggcggtcgccgaggccgagcagaaggccttcgaggtgatcgcgacggagcgggcccgcatggagcagaccatcgccgacgtgaagcggcaggccgccgaggacgcgttcctggtcatcaacgagcaggaggagtccaccgagaactgctggaactgcggccgcaaggccagcgagacctgctccgggtgcaacatcgcccggtactgcggcagcttctgccagcacaaggactgggagcgccaccaccggctctgcgggcagaacctgcacggccagagcccccacggccaggggcgccccctgctcccggtgggccgggggtccagcgcccgctccgccgactgcagcgtgccctcccccgcgctggacaagacgagcgccaccacctcccggagctccacccccgccagcgtcacggccatcgacaccaacggcctgtgatgatgaggactagtccctgttcccagagcccacttttttttctttttttgaaataaaatagcctgtctttcagatctcaaaggctcttttcagagccaccaaaaaaaaaaaaaaaaaaaaaaaaaaaaaaaaaaaaaaaaaaaaaaaaaaaaaaaaaaaaaaaaaaaaaaaaaaaaaaaaaaaaaaaaaaaaaaaaaaaaagaatt

SEQ ID NO: 1287 - RNA, 2761 nt, synthetic construct
  misc_feature 1..2761: note = Artificial____RUNX1(1-241)_I_RUNX1T1b(22-604) mRNA opt1
  source 1..2761: mol_type = other RNA
aggagagtcccgcagtcggcgtccagcggctctgcttgttcgtgtgtgtgtcgttgcaggccttattcaagcttaccatgcgcatccccgtggacgccagcacctcccggcgcttcaccccgcccagcacggccctgtcccccggcaagatgagcgaggcgctccccctgggggccccggacgccggcgccgccctggcggggaagctccggtccggcgaccgcagcatggtcgaggtgctggccgaccaccccggggagctggtgcggaccgactcccccaacttcctctgcagcgtcctgcccacccactggcgctgcaacaagaccctgccgatcgccttcaaggtggtggccctcggcgacgtccccgacggcacgctggtgaccgtgatggcggggaacgacgagaactactccgccgagctgcggaacgccaccgccgccatgaagaaccaggtcgcgcgcttcaacgacctccggttcgtgggccgcagcgggcggggcaagtccttcaccctgacgatcaccgtgttcaccaacccgccccaggtcgccacctaccaccgcgccatcaagatcacggtggacgggccccgggagccccgccggcaccgccagaagctggacgaccagaccaagcccggcagcctctccttcagcgagcggctgtccgagctggagcagctccgccggaccgccatgcgcgtgagcccccaccacccggcccccacccccaacccccgggcgtccctgaaccacagcacggccttcaacccgcagccccagtcccagatgcagatcggccccgagaagcgcgtccccgccatgccggggagccccgtggaggtgaagatccagagccgctccagcccgcccaccatgccgcccctgcccccgatcaaccccggcgggccccggcccgtctccttcacccccaccgccctcagcaacggcatcaaccactccccgcccacgctgaacggcgcccccagcccgccccagcgcttctccaacgggcccgcgagctccaccagctccgccctgaccaaccagcagctccccgcgacctgcggcgcccggcagctgagcaagctgaagcgcttcctcacgaccctgcagcagttcgggaacgacatctcccccgagatcggcgagaaggtgcggaccctggtgctcgccctggtcaacagcaccgtgacgatcgaggagttccactgcaagctgcaggaggccaccaacttccccctccgccccttcgtgatccccttcctgaaggccaacctgccgctcctgcagcgggagctgctccactgcgcccgcgccgcgaagcagaccccctcccagtacctggcccagcacgagcacctcctgctgaacaccagcatcgcctcccccgccgacagctccgagctgctcatggaggtccacgggaacggcaagcggcccagcccggagcgccgggaggagaacagcttcgaccgcgacacgatcgcccccgagccgcccgcgaagcgggtgtgcaccatctcccccgcgccccgccacagccccgccctgaccgtcccgctgatgaaccccggcgggcagttccaccccacgcccccgcccctgcagcactacaccctcgaggacatcgccacctcccacctgtaccgggagcccaacaagatgctggagcaccgcgaggtgcgggaccgccaccacagcctcggcctgaacgggggctaccaggacgagctggtggaccaccggctcaccgagcgcgagtgggccgacgagtggaagcacctggaccacgccctgaactgcatcatggagatggtcgagaagacccgccggtccatggccgtgctccgccggtgccaggagagcgaccgcgaggagctgaactactggaagcggcgctacaacgagaacaccgagctgcggaagacggggaccgagctcgtgtcccgccagcacagccccggctccgccgacagcctgtccaacgacagccagcgggagttcaactcccgcccgggcaccgggtacgtccccgtggagttctggaagaagaccgaggaggccgtgaacaaggtcaagatccaggccatgagcgaggtgcagaaggcggtggccgaggccgagcagaaggccttcgaggtcatcgcgacggagcgggcccgcatggagcagaccatcgccgacgtgaagcggcaggccgccgaggacgcgttcctggtgatcaacgagcaggaggagtccaccgagaactgctggaactgcggccgcaaggccagcgagacctgctccgggtgcaacatcgcccggtactgcggcagcttctgccagcacaaggactgggagcgccaccaccggctctgcgggcagaacctgcacggccagagcccccacggccaggggcgccccctgctcccggtcggccgggggtccagcgcccgctccgccgactgcagcgtgccctcccccgcgctggacaagacgagcgccaccacctcccggagctccacccccgccagcgtgacggccatcgacaccaacggcctgtgatgatgaggactagtccctgttcccagagcccacttttttttctttttttgaaataaaatagcctgtctttcagatctcaaaggctcttttcagagccaccaaaaaaaaaaaaaaaaaaaaaaaaaaaaaaaaaaaaaaaaaaaaaaaaaaaaaaaaaaaaaaaaaaaaaaaaaaaaaaaaaaaaaaaaaaaaaaaaaaaaagaatt

SEQ ID NO: 1288 - RNA, 1645 nt, synthetic construct
  misc_feature 1..1645: note = Homo sapiens__Q01196-1__RUNX1(K83E_R174Q) mRNA opt3
  source 1..1645: mol_type = other RNA
aggagagtcccgcagtcggcgtccagcggctctgcttgttcgtgtgtgtgtcgttgcaggccttattcaagcttaccatgagaatccccgtggatgccagcaccagcagaagattcacccctcctagcaccgctctgagccctggcaagatgtctgaagctctgcctctgggagcacctgatgctggtgcagctctggccggaaaactgagaagcggcgacagatccatggtggaagtgctggctgatcaccccggcgaacttgtgcggacagacagccctaatttcctgtgcagcgtgctgcctacacactggcggtgcaatgagacactgcctatcgccttcaaggtggtggccctgggagatgtgcctgatggcacactggttacagtgatggccggcaacgacgagaactacagcgccgagctgagaaatgccaccgccgccatgaagaaccaggtggccagattcaacgacctgagattcgtgggcagaagcggcaggggcaagagctttaccctgaccatcaccgtgttcaccaatcctccacaggtggcaacctaccaccgggccatcaagatcacagtggacggccctcaagagcccagacggcacagacagaaactggacgaccagaccaagcctggcagcctgagctttagcgagagactgagcgagctggaacagctgagaagaaccgccatgcgggtgtccccacatcaccctgctcctacacctaatcctcgggccagcctgaatcacagcaccgcctttaatccccagcctcagagccagatgcaggacaccagacagattcagccttctccaccttggagctacgaccagagctaccagtacctgggctctatcgcctctcctagcgtgcaccctgccacacctattagtcctggcagagccagcggcatgacaacactgtctgccgagctgtccagcagactgagcacagcccctgatctgaccgccttcagcgaccctagacagttccctgctctgcccagcatctctgaccccagaatgcattaccctggcgccttcacatacagccccacacctgtgacaagcggcatcggcattggcatgtctgccatgggaagcgccaccagataccacacctacctgcctccaccttatcctggcagctctcaggctcaaggcggcccttttcaggccagctctccttcctaccacctgtactatggcgccagcgccggctcctaccagttttctatggttggaggcgagcggagccctcctagaatcctgcctccttgtaccaacgccagcacaggatctgccctgctgaatcccagcctgcctaatcagagcgacgtggtggaagccgagggcagccatagcaacagccctaccaatatggcccctagcgccagactggaagaggccgtttggaggccttactgatgatgaggactagtccctgttcccagagcccacttttttttctttttttgaaataaaatagcctgtctttcagatctcaaaggctcttttcagagccaccaaaaaaaaaaaaaaaaaaaaaaaaaaaaaaaaaaaaaaaaaaaaaaaaaaaaaaaaaaaaaaaaaaaaaaaaaaaaaaaaaaaaaaaaaaaaaaaaaaaaagaatt

SEQ ID NO: 1289 - RNA, 2119 nt, synthetic construct
  misc_feature 1..2119: note = Homo sapiens____CBFbeta(1-165)_SMMHC(1527-1972) mRNA opt3
  source 1..2119: mol_type = other RNA
aggagagtcccgcagtcggcgtccagcggctctgcttgttcgtgtgtgtgtcgttgcaggccttattcaagcttaccatgcctagagtggtgcccgaccagagaagcaagttcgagaacgaagagttctttcggaagctgagcagagagtgcgagatcaagtacaccggcttccgggacagaccccacgaagaaagacaggccagattccagaacgcctgcagagatggcagatccgagatcgcctttgtggccaccggcaccaatctgagcctgcagttctttccagcctcctggcagggcgagcagagacaaacacccagcagagaatacgtggacctggaacgcgaggccggcaaggtgtacctgaaggcccctatgatcctgaacggcgtgtgcgtgatctggaaaggctggatcgatctgcagcggctggatggcatgggctgcctggaatttgacgaggaaagagcccagcaagaggacgcccttgctcagcaggcctttgaggaagccagaaggcggaccagagagttcgaggacagagacagatcccaccgggaagagatggaagtgcacgagctggaaaagagcaagagagccctggaaacccagatggaagaaatgaagacccagctcgaggaactcgaggacgagctgcaggccacagaggatgccaagctgagactggaagtgaacatgcaggccctgaagggccagttcgagagagatctgcaggctagggacgagcagaacgaggaaaagcggagacagctgcagaggcagctgcacgagtacgagacagagctggaagatgagcggaagcagagagcactggccgctgccgccaagaagaaactggaaggcgacctgaaggatctggaactccaggccgacagcgccatcaagggaagagaagaggccatcaagcagctgcggaagctgcaagcccagatgaaggacttccagcgcgagttggaagatgccagagccagcagggatgagatcttcgccaccgccaaagagaacgagaagaaggccaagagcctggaagccgatctgatgcagctccaagaggatctggctgccgccgagagagccagaaaacaggccgacctggaaaaagaggaactggccgaagaactggccagcagcctgtctggcagaaacgctctgcaggacgagaagagaaggctggaagccaggatcgcccagttggaggaagaactcgaagaggaacagggcaacatggaagccatgagcgacagagtgcggaaggccacacagcaggctgagcagctgagcaatgagctggccaccgagagaagcacagcccagaagaatgagagcgccaggcagcagctcgagcggcagaacaaagagctgagaagcaaactgcacgaaatggaaggggccgtgaagtccaagttcaagagcacaatcgccgctctcgaggccaagatcgctcagctcgaagaacaggtggaacaagaggcccgggaaaagcaggccgccacaaagtctctgaagcagaaggacaagaagctgaaagaaatcctgctgcaggtcgaggatgagagaaagatggccgagcagtacaaagaacaggctgagaagggcaacgccagagtgaagcagctgaaacggcaactggaagaggccgaggaagagtcccagagaatcaacgccaacagacggaaactgcagagagagctggacgaagccaccgagtccaatgaggccatgggcagagaagtgaacgccctgaagtctaagctgcggagaggcaacgaaaccagcttcgtgcccagcagaagatccggcggcagaagagtgatcgagaacgccgatggctctgaggaagaaaccgacaccagagatgccgacttcaacggcacaaaggccagcgagtaatgatgaggactagtccctgttcccagagcccacttttttttctttttttgaaataaaatagcctgtctttcagatctcaaaggctcttttcagagccaccaaaaaaaaaaaaaaaaaaaaaaaaaaaaaaaaaaaaaaaaaaaaaaaaaaaaaaaaaaaaaaaaaaaaaaaaaaaaaaaaaaaaaaaaaaaaaaaaaaaaagaatt

SEQ ID NO: 1290 - RNA, 1834 nt, synthetic construct
  misc_feature 1..1834: note = Artificial____CBFbeta(1-165)_SMMHC(1527-1877) mRNA opt3
  source 1..1834: mol_type = other RNA
aggagagtcccgcagtcggcgtccagcggctctgcttgttcgtgtgtgtgtcgttgcaggccttattcaagcttaccatgcctagagtggtgcccgaccagagaagcaagttcgagaacgaagagttctttcggaagctgagcagagagtgcgagatcaagtacaccggcttccgggacagaccccacgaagaaagacaggccagattccagaacgcctgcagagatggcagatccgagatcgcctttgtggccaccggcaccaatctgagcctgcagttctttccagcctcctggcagggcgagcagagacaaacacccagcagagaatacgtggacctggaacgcgaggccggcaaggtgtacctgaaggcccctatgatcctgaacggcgtgtgcgtgatctggaaaggctggatcgatctgcagcggctggatggcatgggctgcctggaatttgacgaggaaagagcccagcaagaggacgcccttgctcagcaggcctttgaggaagccagaaggcggaccagagagttcgaggacagagacagatcccaccgggaagagatggaagtgcacgagctggaaaagagcaagagagccctggaaacccagatggaagaaatgaagacccagctcgaggaactcgaggacgagctgcaggccacagaggatgccaagctgagactggaagtgaacatgcaggccctgaagggccagttcgagagagatctgcaggctagggacgagcagaacgaggaaaagcggagacagctgcagaggcagctgcacgagtacgagacagagctggaagatgagcggaagcagagagcactggccgctgccgccaagaagaaactggaaggcgacctgaaggatctggaactccaggccgacagcgccatcaagggaagagaagaggccatcaagcagctgcggaagctgcaagcccagatgaaggacttccagcgcgagttggaagatgccagagccagcagggatgagatcttcgccaccgccaaagagaacgagaagaaggccaagagcctggaagccgatctgatgcagctccaagaggatctggctgccgccgagagagccagaaaacaggccgacctggaaaaagaggaactggccgaagaactggccagcagcctgtctggcagaaacgctctgcaggacgagaagagaaggctggaagccaggatcgcccagttggaggaagaactcgaagaggaacagggcaacatggaagccatgagcgacagagtgcggaaggccacacagcaggctgagcagctgagcaatgagctggccaccgagagaagcacagcccagaagaatgagagcgccaggcagcagctcgagcggcagaacaaagagctgagaagcaaactgcacgaaatggaaggggccgtgaagtccaagttcaagagcacaatcgccgctctcgaggccaagatcgctcagctcgaagaacaggtggaacaagaggcccgggaaaagcaggccgccacaaagtctctgaagcagaaggacaagaagctgaaagaaatcctgctgcaggtcgaggatgagagaaagatggccgagcagtacaaagaacaggctgagaagggcaacgcctgatgatgaggactagtccctgttcccagagcccacttttttttctttttttgaaataaaatagcctgtctttcagatctcaaaggctcttttcagagccaccaaaaaaaaaaaaaaaaaaaaaaaaaaaaaaaaaaaaaaaaaaaaaaaaaaaaaaaaaaaaaaaaaaaaaaaaaaaaaaaaaaaaaaaaaaaaaaaaaaaaagaatt

SEQ ID NO: 1291 - RNA, 895 nt, synthetic construct
  misc_feature 1..895: note = Artificial____CBFbeta(1-165)_Linker_Lifeact mRNA opt3
  source 1..895: mol_type = other RNA
aggagagtcccgcagtcggcgtccagcggctctgcttgttcgtgtgtgtgtcgttgcaggccttattcaagcttaccatgcctagagtggtgcccgaccagagaagcaagttcgagaacgaagagttctttcggaagctgagcagagagtgcgagatcaagtacaccggcttccgggacagaccccacgaagaaagacaggccagattccagaacgcctgcagagatggcagatccgagatcgcctttgtggccaccggcaccaatctgagcctgcagttctttccagcctcctggcagggcgagcagagacaaacacccagcagagaatacgtggacctggaacgcgaggccggcaaggtgtacctgaaggcccctatgatcctgaacggcgtgtgcgtgatctggaaaggctggatcgatctgcagcggctggatggcatgggctgcctggaatttgacgaggaaagagcccagcaagaggacgcccttgctcagcaggcctttgaggaagccagaaggcggaccagagagttcgaggacagagacagatcccaccgggaagagatggaaggcggatctggtggaagcggaggtagcggaggatcaggcggaggcggagttgccgatctgatcaagaagttcgagtccatcagcaaagaagagggcgaccctccagtggccacatgatgatgaggactagtccctgttcccagagcccacttttttttctttttttgaaataaaatagcctgtctttcagatctcaaaggctcttttcagagccaccaaaaaaaaaaaaaaaaaaaaaaaaaaaaaaaaaaaaaaaaaaaaaaaaaaaaaaaaaaaaaaaaaaaaaaaaaaaaaaaaaaaaaaaaaaaaaaaaaaaaagaatt

SEQ ID NO: 1292 - RNA, 862 nt, synthetic construct
  misc_feature 1..862: note = Artificial____CBFbeta(1-165)_HIF1alpha(549-575) mRNA opt3
  source 1..862: mol_type = other RNA
aggagagtcccgcagtcggcgtccagcggctctgcttgttcgtgtgtgtgtcgttgcaggccttattcaagcttaccatgcctagagtggtgcccgaccagagaagcaagttcgagaacgaagagttctttcggaagctgagcagagagtgcgagatcaagtacaccggcttccgggacagaccccacgaagaaagacaggccagattccagaacgcctgcagagatggcagatccgagatcgcctttgtggccaccggcaccaatctgagcctgcagttctttccagcctcctggcagggcgagcagagacaaacacccagcagagaatacgtggacctggaacgcgaggccggcaaggtgtacctgaaggcccctatgatcctgaacggcgtgtgcgtgatctggaaaggctggatcgatctgcagcggctggatggcatgggctgcctggaatttgacgaggaaagagcccagcaagaggacgcccttgctcagcaggcctttgaggaagccagaaggcggaccagagagttcgaggacagagacagatcccaccgggaagagatggaacccttcagcacccaagacaccgacctggacctcgaaatgctggccccttacatccccatggacgacgacttccagctgcggtaatgatgaggactagtccctgttcccagagcccacttttttttctttttttgaaataaaatagcctgtctttcagatctcaaaggctcttttcagagccaccaaaaaaaaaaaaaaaaaaaaaaaaaaaaaaaaaaaaaaaaaaaaaaaaaaaaaaaaaaaaaaaaaaaaaaaaaaaaaaaaaaaaaaaaaaaaaaaaaaaaagaatt

SEQ ID NO: 1293 - RNA, 907 nt, synthetic construct
  misc_feature 1..907: note Artificial____CBFbeta(1-165)_Linker_HIF1alpha(549-575) mRNA opt3
  source 1..907: mol_type = other RNA
aggagagtcccgcagtcggcgtccagcggctctgcttgttcgtgtgtgtgtcgttgcaggccttattcaagcttaccatgcctagagtggtgcccgaccagagaagcaagttcgagaacgaagagttctttcggaagctgagcagagagtgcgagatcaagtacaccggcttccgggacagaccccacgaagaaagacaggccagattccagaacgcctgcagagatggcagatccgagatcgcctttgtggccaccggcaccaatctgagcctgcagttctttccagcctcctggcagggcgagcagagacaaacacccagcagagaatacgtggacctggaacgcgaggccggcaaggtgtacctgaaggcccctatgatcctgaacggcgtgtgcgtgatctggaaaggctggatcgatctgcagcggctggatggcatgggctgcctggaatttgacgaggaaagagcccagcaagaggacgcccttgctcagcaggcctttgaggaagccagaaggcggaccagagagttcgaggacagagacagatcccaccgggaagagatggaaggcggatctggtggaagcggaggtagcggaggatctggcggaggacctttcagcacccaagacaccgacctggacctcgaaatgctggccccttacatccccatggacgacgacttccagctgcggtaatgatgaggactagtccctgttcccagagcccacttttttttctttttttgaaataaaatagcctgtctttcagatctcaaaggctcttttcagagccaccaaaaaaaaaaaaaaaaaaaaaaaaaaaaaaaaaaaaaaaaaaaaaaaaaaaaaaaaaaaaaaaaaaaaaaaaaaaaaaaaaaaaaaaaaaaaaaaaaaaaagaatt

SEQ ID NO: 1294 - RNA, 2542 nt, synthetic construct
  misc_feature 1..2542: note = Artificial____RUNX1(1-177)_N_RUNX1T1a(31-604) mRNA opt3
  source 1..2542: mol_type = other RNA
aggagagtcccgcagtcggcgtccagcggctctgcttgttcgtgtgtgtgtcgttgcaggccttattcaagcttaccatgagaatccccgtggatgccagcaccagcagaagattcacccctcctagcaccgctctgagccctggcaagatgtctgaagctctgcctctgggagcacctgatgctggtgcagctctggccggaaaactgagaagcggcgacagatccatggtggaagtgctggctgatcaccccggcgaacttgtgcggacagacagccctaatttcctgtgcagcgtgctgcctacacactggcggtgcaacaagacactgcctatcgccttcaaggtggtggctctgggagatgtgcctgatggcacactggtcacagtgatggccggcaacgacgagaattacagcgccgagctgagaaatgccaccgccgccatgaagaaccaggtggccagattcaacgacctgagattcgtgggcagaagcggcaggggcaagagctttaccctgaccatcaccgtgttcaccaatcctccacaggtggcaacctaccaccgggccatcaagatcaccgtggatggccctagagagccccggaacagaacagagaagcacagcaccatgcctgacagccccgtggacgtgaaaacccagagcagactgacccctccaaccatgcctcctccacctacaacacagggcgctcctagaaccagcagcttcacccctaccacactgaccaacggcacctctcacagccccacagctcttaatggcgccccttctccacctaacggcttcagcaatggcccaagcagcagcagctctagcagcctggctaatcagcagctgcctcctgcttgtggcgctagacagctgagcaagctgaagcggttcctgaccacactgcagcagttcggcaacgatatcagccccgagatcggcgagcgcgtcagaacactggttctgggcctcgtgaatagcaccctgacaatcgaagagttccacagcaagctgcaagaggccaccaactttccgctgcggcctttcgtgatcccattcctgaaggccaacctgcctctgctgcagagagaactgctccactgcgccagactggccaagcagaaccctgctcagtatctggcccagcacgagcaactgctgctggacgcctctacaacaagccctgtggatagcagcgagctgctcctggatgtgaacgagaacggcaagcggagaacccctgaccggaccaaagagaacggcttcgacagagagcctctgcacagcgagcaccccagcaaaagaccctgcacaatcagccctggccagcggtactctcccaacaacggcctgagctaccagcctaacggactgccccatcctacacctccacctccacagcactaccggctggacgatatggctatcgcccaccactaccgggacagctacagacaccctagccaccgggacctgcgggacagaaatagacctatgggcctgcacggcacccggcaagaggaaatgattgaccaccggctgaccgacagagaatgggccgaagagtggaagcacctggaccatctgctgaactgcatcatggatatggtggaaaagacccggcggagcctgaccgtgctgagaagatgtcaagaggccgatagagaggaactgaactactggatccggcggtacagcgacgccgaggatcttaagaaaggcggcggatctagcagcagccacagcagacagcagagccccgtgaatcctgatcctgtggcactggatgcccacagagaatttctgcacagacccgccagcggctacgtgccagaggaaatctggaagaaagccgaagaggccgtgaacgaagtgaagagacaggccatgaccgaactgcagaaagccgtgtctgaggccgagagaaaggcccacgatatgatcacaaccgagcgggccaagatggaaagaacagtggccgaggccaaaagacaggccgccgaagatgctctggctgtgatcaatcagcaagaggacagcagcgagtcctgctggaactgtggcagaaaggccagcgagacatgcagcggctgtaacaccgccagatattgcggcagcttctgccagcacaaggactgggagaagcaccaccacatctgcggccagacactgcaggctcagcagcaaggcgatactcctgccgtgtctagcagcgtgacccctaattctggcgccggatctcccatggatacccctccagctgccacacctagaagcacaacccctggcacacccagcaccatcgagacaacccctagatgatgatgaggactagtccctgttcccagagcccacttttttttctttttttgaaataaaatagcctgtctttcagatctcaaaggctcttttcagagccaccaaaaaaaaaaaaaaaaaaaaaaaaaaaaaaaaaaaaaaaaaaaaaaaaaaaaaaaaaaaaaaaaaaaaaaaaaaaaaaaaaaaaaaaaaaaaaaaaaaaaagaatt

SEQ ID NO: 1295 - RNA, 1057 nt, synthetic construct
  misc_feature 1..1057: note = Artificial____RUNX1(1-241)_RUNX1T1b(short) mRNA opt3
  source 1..1057: mol_type = other RNA
aggagagtcccgcagtcggcgtccagcggctctgcttgttcgtgtgtgtgtcgttgcaggccttattcaagcttaccatgagaatccccgtggatgccagcaccagcagaagattcacccctcctagcaccgctctgagccctggcaagatgtctgaagctctgcctctgggagcacctgatgctggtgcagctctggccggaaaactgagaagcggcgacagatccatggtggaagtgctggctgatcaccccggcgaacttgtgcggacagacagccctaatttcctgtgcagcgtgctgcctacacactggcggtgcaacaagacactgcctatcgccttcaaggtggtggctctgggagatgtgcctgatggcacactggtcacagtgatggccggcaacgacgagaattacagcgccgagctgagaaatgccaccgccgccatgaagaaccaggtggccagattcaacgacctgagattcgtgggcagaagcggcaggggcaagagctttaccctgaccatcaccgtgttcaccaatcctccacaggtggcaacctaccaccgggccatcaagatcaccgtggatggccctagagagcccagacggcacagacagaaactggacgaccagaccaagcctggcagcctgagctttagcgagagactgagcgagctggaacagctgagaagaaccgccatgcgggtgtccccacatcaccctgctcctacacctaatcctcgggccagcctgaatcacagcaccgcctttaatccccagcctcagagccagatgcaagaagtgggcttctgtcacgtggcccaagtgggactgaagctgctgggataatgatgaggactagtccctgttcccagagcccacttttttttctttttttgaaataaaatagcctgtctttcagatctcaaaggctcttttcagagccaccaaaaaaaaaaaaaaaaaaaaaaaaaaaaaaaaaaaaaaaaaaaaaaaaaaaaaaaaaaaaaaaaaaaaaaaaaaaaaaaaaaaaaaaaaaaaaaaaaaaaagaatt

SEQ ID NO: 1296 - RNA, 2761 nt, synthetic construct
  misc_feature 1..2761: note = Artificial____RUNX1(1-241)_V_RUNX1T1b(22-604) mRNA opt3
  source 1..2761: mol_type = other RNA
aggagagtcccgcagtcggcgtccagcggctctgcttgttcgtgtgtgtgtcgttgcaggccttattcaagcttaccatgagaatccccgtggatgccagcaccagcagaagattcacccctcctagcaccgctctgagccctggcaagatgtctgaagctctgcctctgggagcacctgatgctggtgcagctctggccggaaaactgagaagcggcgacagatccatggtggaagtgctggctgatcaccccggcgaacttgtgcggacagacagccctaatttcctgtgcagcgtgctgcctacacactggcggtgcaacaagacactgcctatcgccttcaaggtggtggctctgggagatgtgcctgatggcacactggtcacagtgatggccggcaacgacgagaattacagcgccgagctgagaaatgccaccgccgccatgaagaaccaggtggccagattcaacgacctgagattcgtgggcagaagcggcaggggcaagagctttaccctgaccatcaccgtgttcaccaatcctccacaggtggcaacctaccaccgggccatcaagatcaccgtggatggccctagagagcccagacggcacagacagaaactggacgaccagaccaagcctggcagcctgagctttagcgagagactgagcgagctggaacagctgagaagaaccgccatgcgggtgtccccacatcaccctgctcctacacctaatcctcgggccagcctgaatcacagcaccgcctttaatccccagcctcagagccagatgcaagtgggccctgagaaaagggtgccagccatgcctggaagccccgtggaagtgaagatccagagcagatctagccctcctaccatgcctcctctgcctccaatcaatcctggcggccctagacctgtgtccttcacacctaccgctctgtccaacggcatcaatcacagccctccaacactgaatggcgccccatctccacctcagcggttttctaatggccctgccagcagcacaagcagcgccctgacaaatcagcagctgcctgctacatgtggcgccagacagctgagcaagctgaagcggtttctgaccacactgcagcagttcggcaacgatatcagccccgagatcggcgagaaagtgcggacactggttctggccctggtcaacagcaccgtgaccatcgaagagttccactgcaagctgcaagaggccaccaactttccgctgcggcctttcgtgatcccattcctgaaggccaacctgcctctgctgcagagagagctgctgcattgcgccagagccgccaagcagacaccttctcagtatctggcccagcacgagcatctgctgctgaacacctctatcgcctctccagccgatagcagcgagctgctcatggaagtgcacggcaacggaaagaggccctctccagagcggagagaggaaaacagcttcgaccgggacacaatcgcccctgagcctccagccaagagagtgtgcacaatcagcccagctcctagacacagccccgctctgacagtgccccttatgaaccctggcggacagtttcaccccacacctccaccactccagcactacaccctggaagatatcgccaccagccacctgtaccgcgagcctaacaagatgctggaacaccgggaagtgcgcgacaggcaccattctctgggactgaacggcggctaccaggacgaactggtggatcacagactgaccgagcgcgagtgggccgatgaatggaaacacctggatcacgccctgaactgcatcatggaaatggtggaaaagacccggcggagcatggccgtcctgagaagatgtcaagagagcgacagagaggaactgaactactggaagcggaggtacaacgagaacaccgagctgcggaaaaccggcactgagctggtgtccagacagcactctcctggctctgccgatagcctgagcaacgactcccagagagagttcaacagcagacccggcacaggctacgtgcccgtggaattttggaagaaaaccgaagaggccgtgaacaaagtcaagattcaggccatgagcgaggtgcagaaagccgtggctgaggccgaacagaaagccttcgaagtgatcgccaccgagcgggccagaatggaacagacaatcgccgacgtgaagagacaggccgccgaggatgccttcctggtcatcaacgagcaagaggaaagcaccgagaactgctggaactgcggcagaaaggccagcgagacatgcagcggctgcaatatcgccagatattgcggcagcttctgccagcacaaggactgggagagacaccacagactgtgcggccagaatctgcacggacagagccctcatggacagggcagacctctgctccctgttggcagaggatctagcgccagatctgccgactgtagcgtgccatctcctgcactggataagaccagcgccaccacaagcagaagcagcacaccagcctctgtgaccgccatcgataccaacggactgtgatgatgaggactagtccctgttcccagagcccacttttttttctttttttgaaataaaatagcctgtctttcagatctcaaaggctcttttcagagccaccaaaaaaaaaaaaaaaaaaaaaaaaaaaaaaaaaaaaaaaaaaaaaaaaaaaaaaaaaaaaaaaaaaaaaaaaaaaaaaaaaaaaaaaaaaaaaaaaaaaaagaatt

SEQ ID NO: 1297 - RNA, 2761 nt, synthetic construct
  misc_feature 1..2761: note = Artificial____RUNX1(1-241)_I_RUNX1T1b(22-604) mRNA opt3
  source 1..2761: mol_type = other RNA
aggagagtcccgcagtcggcgtccagcggctctgcttgttcgtgtgtgtgtcgttgcaggccttattcaagcttaccatgagaatccccgtggatgccagcaccagcagaagattcacccctcctagcaccgctctgagccctggcaagatgtctgaagctctgcctctgggagcacctgatgctggtgcagctctggccggaaaactgagaagcggcgacagatccatggtggaagtgctggctgatcaccccggcgaacttgtgcggacagacagccctaatttcctgtgcagcgtgctgcctacacactggcggtgcaacaagacactgcctatcgccttcaaggtggtggctctgggagatgtgcctgatggcacactggtcacagtgatggccggcaacgacgagaattacagcgccgagctgagaaatgccaccgccgccatgaagaaccaggtggccagattcaacgacctgagattcgtgggcagaagcggcaggggcaagagctttaccctgaccatcaccgtgttcaccaatcctccacaggtggcaacctaccaccgggccatcaagatcaccgtggatggccctagagagcccagacggcacagacagaaactggacgaccagaccaagcctggcagcctgagctttagcgagagactgagcgagctggaacagctgagaagaaccgccatgcgggtgtccccacatcaccctgctcctacacctaatcctcgggccagcctgaatcacagcaccgcctttaatccccagcctcagagccagatgcagatcggccctgagaaaagggtgccagccatgcctggaagccccgtggaagtgaagatccagagcagatctagccctcctaccatgcctcctctgcctccaatcaatcctggcggccctagacctgtgtccttcacacctaccgctctgtccaacggcatcaatcacagccctccaacactgaatggcgccccatctccacctcagcggttttctaatggccctgccagcagcacaagcagcgccctgacaaatcagcagctgcctgctacatgtggcgccagacagctgagcaagctgaagcggtttctgaccacactgcagcagttcggcaacgatatcagccccgagatcggcgagaaagtgcggacactggttctggccctggtcaacagcaccgtgaccatcgaagagttccactgcaagctgcaagaggccaccaactttccgctgcggcctttcgtgatcccattcctgaaggccaacctgcctctgctgcagagagagctgctgcattgcgccagagccgccaagcagacaccttctcagtatctggcccagcacgagcatctgctgctgaacacctctatcgcctctccagccgatagcagcgagctgctcatggaagtgcacggcaacggaaagaggccctctccagagcggagagaggaaaacagcttcgaccgggacacaatcgcccctgagcctccagccaagagagtgtgcacaatcagcccagctcctagacacagccccgctctgacagtgccccttatgaaccctggcggacagtttcaccccacacctccaccactccagcactacaccctggaagatatcgccaccagccacctgtaccgcgagcctaacaagatgctggaacaccgggaagtgcgcgacaggcaccattctctgggactgaacggcggctaccaggacgaactggtggatcacagactgaccgagcgcgagtgggccgatgaatggaaacacctggatcacgccctgaactgcatcatggaaatggtggaaaagacccggcggagcatggccgtcctgagaagatgtcaagagagcgacagagaggaactgaactactggaagcggaggtacaacgagaacaccgagctgcggaaaaccggcactgagctggtgtccagacagcactctcctggctctgccgatagcctgagcaacgactcccagagagagttcaacagcagacccggcacaggctacgtgcccgtggaattttggaagaaaaccgaagaggccgtgaacaaagtcaagattcaggccatgagcgaggtgcagaaagccgtggctgaggccgaacagaaagccttcgaagtgatcgccaccgagcgggccagaatggaacagacaatcgccgacgtgaagagacaggccgccgaggatgccttcctggtcatcaacgagcaagaggaaagcaccgagaactgctggaactgcggcagaaaggccagcgagacatgcagcggctgcaatatcgccagatattgcggcagcttctgccagcacaaggactgggagagacaccacagactgtgcggccagaatctgcacggacagagccctcatggacagggcagacctctgctccctgttggcagaggatctagcgccagatctgccgactgtagcgtgccatctcctgcactggataagaccagcgccaccacaagcagaagcagcacaccagcctctgtgaccgccatcgataccaacggactgtgatgatgaggactagtccctgttcccagagcccacttttttttctttttttgaaataaaatagcctgtctttcagatctcaaaggctcttttcagagccaccaaaaaaaaaaaaaaaaaaaaaaaaaaaaaaaaaaaaaaaaaaaaaaaaaaaaaaaaaaaaaaaaaaaaaaaaaaaaaaaaaaaaaaaaaaaaaaaaaaaaagaatt

SEQ ID NO: 1298 - RNA, 1645 nt, synthetic construct
  misc_feature 1..1645: note = Homo sapiens__Q01196-1__RUNX1(K83E_R174Q) mRNA opt3
  source 1..1645: mol_type = other RNA
aggagagtcccgcagtcggcgtccagcggctctgcttgttcgtgtgtgtgtcgttgcaggccttattcaagcttaccatgagaatccccgtggacgccagcacctccaggcggttcacacctccatctactgctctgtcaccgggcaagatgagtgaggcactcccccttggggcccctgatgcgggagctgccctggcaggtaaattgcgcagcggcgaccgatccatggtcgaagttttagccgatcacccaggggagctggtgcgtacggactctcccaactttctatgctcggtactccctacccattggagatgtaatgaaacactgccaattgctttcaaggtggtcgcacttggagatgtgcccgacggcactctggttaccgtgatggccggtaacgatgagaattactcagctgaattgaggaacgccacagcggcaatgaaaaatcaggtcgcccggtttaacgacctccgcttcgtggggagaagcggaaggggcaagagttttaccctgactataacagtattcaccaatcctccacaagttgctacgtatcaccgggccatcaaaattactgtggatggcccgcaggagccccgccgacatagacagaagctggacgatcagaccaagcctgggtccctctcttttagcgagaggttatccgaactggagcaacttcggcgtacagcaatgcgcgtctcaccacaccatcccgctcctactccaaaccccagagccagtttgaatcacagcaccgcgttcaacccgcagcctcagtctcagatgcaagacacaaggcagatccagccctccccaccttggtcatacgatcagagctatcaatacctgggaagtattgcctctccctccgtgcacccagcaacccccatcagccctggtcgggcttcgggcatgacgactctatctgccgaactctcctcacgactgagtacagctccagaccttaccgcctttagcgacccgcgccagttccccgcactgccttccatatctgatccaagaatgcattatcccggggcctttacttacagccctacaccagtgacctcaggaatcggcattggtatgagtgctatggggtccgcgacgaggtatcacacctacttgcccccgccttacccaggaagctctcaggcacaaggcggccccttccaggcctcaagtcctagctatcatctctactatggggcttccgccggatcttaccagttttcgatggtcggtggcgagcggagcccaccccgcatcctgcctccctgcacaaatgcatccactgggtcagccttactgaacccaagtctcccgaatcagtctgacgttgtggaggctgaaggaagccactccaactcacctaccaatatggcccccagcgcaagacttgaggaagcggtatggaggccatattgatgatgaggactagtccctgttcccagagcccacttttttttctttttttgaaataaaatagcctgtctttcagatctcaaaggctcttttcagagccaccaaaaaaaaaaaaaaaaaaaaaaaaaaaaaaaaaaaaaaaaaaaaaaaaaaaaaaaaaaaaaaaaaaaaaaaaaaaaaaaaaaaaaaaaaaaaaaaaaaaaagaatt

SEQ ID NO: 1299 - RNA, 2119 nt, synthetic construct
  misc_feature 1..2119: note = Homo sapiens____CBFbeta(1-165)_SMMHC(1527-1972) mRNA opt3
  source 1..2119: mol_type = other RNA
aggagagtcccgcagtcggcgtccagcggctctgcttgttcgtgtgtgtgtcgttgcaggccttattcaagcttaccatgcccagagtggtccctgaccagaggagcaagttcgagaacgaagagtttttccggaaactgtcccgcgaatgcgagatcaagtacaccggctttcgagatcgtccacacgaagagagacaagccaggttccagaatgcttgtcgggacgggcgctctgagattgcatttgttgccacaggaactaacctctcacttcagttctttccggcgagttggcagggtgaacaaagacagacgcccagcagggagtatgtggatctggaacgggaggctggcaaagtatacttgaaggcccctatgatattaaatggggtgtgcgtcatctggaaaggatggattgacctgcagcgcctagatggcatgggttgtctcgagttcgacgaggaacgagcacagcaagaagatgccctggctcagcaggcatttgaggaagccagaaggcggacccgtgagttcgaggaccgcgatagatcccatagggaagagatggaagtgcacgagcttgaaaagtctaagcgggctctggagacacagatggaggaaatgaaaactcaattggaggaactcgaggacgaactgcaggccaccgaggatgcgaagctgcgactcgaggttaacatgcaggcattaaaagggcaatttgaacgcgacctgcaggccagagatgagcagaatgaagagaagaggcggcagcttcaacgccagttgcatgagtatgaaacagagctggaagacgagagaaaacagagggctctagccgcagctgccaagaagaaactcgaaggagacctgaaggatcttgagctgcaggcggactcggccatcaaaggccgtgaggaagcaattaagcaattgcggaaactccaggctcagatgaaggatttccagcgagagctggaagacgccagagcttcaagggatgagatctttgccaccgcaaaagaaaacgagaagaaggccaagagcttagaggctgacctgatgcaactccaggaagatcttgcggcagccgagcgcgctcggaagcaggccgacctggaaaaagaggaattggcagaggagctagccagttccctgtctggcagaaatgctctccaggatgaaaagaggcgcctggaggcccgaatagcacaacttgaagaggagctggaagaggaacaggggaacatggaggcgatgagcgaccgggtgcgtaaagctactcagcaagccgaacagttgtccaatgagctcgcaacagagagatcaaccgcccagaagaacgaaagtgctaggcagcaactggagcgccagaataaggaattacggagcaaactgcacgagatggaaggagccgtcaagtctaaattcaagtccacgatcgcagctctagaggccaaaattgcgcagctcgaggaacaggtggagcaagaagccagagagaagcaggctgcaactaagtcactgaaacagaaggataaaaagttgaaagaaatccttctgcaggtagaggacgagaggaagatggccgaacaatacaaggagcaggctgaaaaaggtaacgcccgagttaagcagctcaaacgccaactggaggaggcagaagaggaaagccagcggattaatgcgaacagaaggaaacttcagcgtgagctggacgaagccaccgagagtaatgaggctatgggccgcgaagtgaacgccttgaaatctaagctccggagagggaacgagacatccttcgtcccaagcaggcgatcgggaggccggcgcgtgatcgaaaatgcagatggttctgaggaagagactgacaccagagatgctgactttaacgggacaaaagcctccgagtgatgatgaggactagtccctgttcccagagcccacttttttttctttttttgaaataaaatagcctgtctttcagatctcaaaggctcttttcagagccaccaaaaaaaaaaaaaaaaaaaaaaaaaaaaaaaaaaaaaaaaaaaaaaaaaaaaaaaaaaaaaaaaaaaaaaaaaaaaaaaaaaaaaaaaaaaaaaaaaaaaagaatt

SEQ ID NO: 1300 - RNA, 1834 nt, synthetic construct
  misc_feature 1..1834: note = Artificial____CBFbeta(1-165)_SMMHC(1527-1877) mRNA opt3
  source 1..1834: mol_type = other RNA
aggagagtcccgcagtcggcgtccagcggctctgcttgttcgtgtgtgtgtcgttgcaggccttattcaagcttaccatgcccagagtggtccctgaccagaggagcaagttcgagaacgaagagtttttccggaaactgtcccgcgaatgcgagatcaagtacaccggctttcgagatcgtccacacgaagagagacaagccaggttccagaatgcttgtcgggacgggcgctctgagattgcatttgttgccacaggaactaacctctcacttcagttctttccggcgagttggcagggtgaacaaagacagacgcccagcagggagtatgtggatctggaacgggaggctggcaaagtatacttgaaggcccctatgatattaaatggggtgtgcgtcatctggaaaggatggattgacctgcagcgcctagatggcatgggttgtctcgagttcgacgaggaacgagcacagcaagaagatgccctggctcagcaggcatttgaggaagccagaaggcggacccgtgagttcgaggaccgcgatagatcccatagggaagagatggaagtgcacgagcttgaaaagtctaagcgggctctggagacacagatggaggaaatgaaaactcaattggaggaactcgaggacgaactgcaggccaccgaggatgcgaagctgcgactcgaggttaacatgcaggcattaaaagggcaatttgaacgcgacctgcaggccagagatgagcagaatgaagagaagaggcggcagcttcaacgccagttgcatgagtatgaaacagagctggaagacgagagaaaacagagggctctagccgcagctgccaagaagaaactcgaaggagacctgaaggatcttgagctgcaggcggactcggccatcaaaggccgtgaggaagcaattaagcaattgcggaaactccaggctcagatgaaggatttccagcgagagctggaagacgccagagcttcaagggatgagatctttgccaccgcaaaagaaaacgagaagaaggccaaaagccttgaggctgacctgatgcaactccaggaagatcttgcggcagccgagcgcgctcggaagcaggccgacctggaaaaagaggaattggcagaggagctagccagttccctgtctggcagaaatgctctccaggatgaaaagaggcgcctggaggcccgaatagcacaacttgaagaggagctggaagaggaacaggggaacatggaggcgatgagcgaccgggtgcgtaaagctactcagcaagccgaacagttgtccaatgagctcgcaacagagagatcaaccgcccagaagaacgaaagtgctaggcagcaactggagcgccagaataaggaattacggagcaaactgcacgagatggaaggagccgtcaagtctaaattcaagtccacgatcgcagctctagaggccaaaattgcgcagctcgaggaacaggtggagcaagaagccagagagaagcaggctgcaactaagtcactgaaacagaaggataaaaagttaaaagaaatcttgctgcaggtagaggacgagaggaagatggccgaacaatacaaggagcaggctgaaaaaggtaacgcctgatgatgaggactagtccctgttcccagagcccacttttttttctttttttgaaataaaatagcctgtctttcagatctcaaaggctcttttcagagccaccaaaaaaaaaaaaaaaaaaaaaaaaaaaaaaaaaaaaaaaaaaaaaaaaaaaaaaaaaaaaaaaaaaaaaaaaaaaaaaaaaaaaaaaaaaaaaaaaaaaaagaatt

SEQ ID NO: 1301 - RNA, 895 nt, synthetic construct
  misc_feature 1..895: note = Artificial____CBFbeta(1-165)_Linker_Lifeact mRNA opt3
  source 1..895: mol_type = other RNA
aggagagtcccgcagtcggcgtccagcggctctgcttgttcgtgtgtgtgtcgttgcaggccttattcaagcttaccatgcccagagtggtccctgaccagaggagcaagttcgagaacgaagagtttttccggaaactgtcccgcgaatgcgagatcaagtacaccggctttcgagatcgtccacacgaagagagacaagccaggttccagaatgcttgtcgggacgggcgctctgagattgcatttgttgccacaggaactaacctctcacttcagttctttccggcgagttggcagggtgaacaaagacagacgcccagcagggagtatgtggatctggaacgggaggctggcaaagtatacttgaaggcccctatgatattaaatggggtgtgcgtcatctggaaaggatggattgacctgcagcgcctagatggcatgggttgtctcgagttcgacgaggaacgagcacagcaagaagatgccctggctcagcaggcatttgaggaagccagaaggcggacccgtgagttcgaggaccgcgatagatcccatagggaagagatggaagggggatctggcggctcagggggatcgggtggcagcgggggaggcggtgtggctgaccttatcaagaagtttgagagtatttccaaagaagagggggatccacccgttgccacatgatgatgaggactagtccctgttcccagagcccacttttttttctttttttgaaataaaatagcctgtctttcagatctcaaaggctcttttcagagccaccaaaaaaaaaaaaaaaaaaaaaaaaaaaaaaaaaaaaaaaaaaaaaaaaaaaaaaaaaaaaaaaaaaaaaaaaaaaaaaaaaaaaaaaaaaaaaaaaaaaaagaatt

SEQ ID NO: 1302 - RNA, 862 nt, synthetic construct
  misc_feature 1..862: note = Artificial____CBFbeta(1-165)_HIF1alpha(549-575) mRNA opt3
  source 1..862: mol_type = other RNA
aggagagtcccgcagtcggcgtccagcggctctgcttgttcgtgtgtgtgtcgttgcaggccttattcaagcttaccatgcccagagtggtccctgaccagaggagcaagttcgagaacgaagagtttttccggaaactgtcccgcgaatgcgagatcaagtacaccggctttcgagatcgtccacacgaagagagacaagccaggttccagaatgcttgtcgggacgggcgctctgagattgcatttgttgccacaggaactaacctctcacttcagttctttccggcgagttggcagggtgaacaaagacagacgcccagcagggagtatgtggatctggaacgggaggctggcaaagtatacttgaaggcccctatgatattaaatggggtgtgcgtcatctggaaaggatggattgacctgcagcgcctagatggcatgggttgtctcgagttcgacgaggaacgagcacagcaagaagatgccctggctcagcaggcatttgaggaagccagaaggcggacccgtgagttcgaggaccgcgatagatcccatagggaagagatggaaccattttctacacaggacactgatcttgacctggagatgttggctccctatatccctatggatgacgacttccaactccggtgatgatgaggactagtccctgttcccagagcccacttttttttctttttttgaaataaaatagcctgtctttcagatctcaaaggctcttttcagagccaccaaaaaaaaaaaaaaaaaaaaaaaaaaaaaaaaaaaaaaaaaaaaaaaaaaaaaaaaaaaaaaaaaaaaaaaaaaaaaaaaaaaaaaaaaaaaaaaaaaaaagaatt

SEQ ID NO: 1303 - RNA, 907 nt, synthetic construct
  misc_feature 1..907: note Artificial____CBFbeta(1-165)_Linker_HIF1alpha(549-575) mRNA opt3
  source 1..907: mol_type = other RNA
aggagagtcccgcagtcggcgtccagcggctctgcttgttcgtgtgtgtgtcgttgcaggccttattcaagcttaccatgcccagagtggtccctgaccagaggagcaagttcgagaacgaagagtttttccggaaactgtcccgcgaatgcgagatcaagtacaccggctttcgagatcgtccacacgaagagagacaagccaggttccagaatgcttgtcgggacgggcgctctgagattgcatttgttgccacaggaactaacctctcacttcagttctttccggcgagttggcagggtgaacaaagacagacgcccagcagggagtatgtggatctggaacgggaggctggcaaagtatacttgaaggcccctatgatattaaatggggtgtgcgtcatctggaaaggatggattgacctgcagcgcctagatggcatgggttgtctcgagttcgacgaggaacgagcacagcaagaagatgccctggctcagcaggcatttgaggaagccagaaggcggacccgtgagttcgaggaccgcgatagatcccatagggaagagatggaagggggatctggcggctcagggggatcgggtggcagcgggggaggcccatttagtacacaggacactgatcttgacctggagatgttggctccctatatccctatggatgacgacttccaactccggtgatgatgaggactagtccctgttcccagagcccacttttttttctttttttgaaataaaatagcctgtctttcagatctcaaaggctcttttcagagccaccaaaaaaaaaaaaaaaaaaaaaaaaaaaaaaaaaaaaaaaaaaaaaaaaaaaaaaaaaaaaaaaaaaaaaaaaaaaaaaaaaaaaaaaaaaaaaaaaaaaaagaatt

SEQ ID NO: 1304 - RNA, 2542 nt, synthetic construct
  misc_feature 1..2542: note = Artificial____RUNX1(1-177)_N_RUNX1T1a(31-604) mRNA opt3
  source 1..2542: mol_type = other RNA
aggagagtcccgcagtcggcgtccagcggctctgcttgttcgtgtgtgtgtcgttgcaggccttattcaagcttaccatgagaatccccgtggacgccagcacctccaggcggttcacacctccatctactgctctgtcaccgggcaagatgagtgaggcactcccccttggggcccctgatgcgggagctgccctggcaggtaaattgcgcagcggcgaccgatccatggtcgaagttttagccgatcacccaggggagctggtgcgtacggactctcccaactttctatgctcggtactccctacccattggagatgtaataagacactgccaattgctttcaaagtggtcgcacttggagatgtgcccgacggcactctggttaccgtgatggccggtaacgatgaaaattactcagctgagttgaggaacgccacagcggcaatgaagaatcaggtcgcccggtttaacgacctccgcttcgtggggagaagcggaaggggcaaaagttttaccctgactataacagtattcaccaatcctccacaagttgctacgtatcaccgggccatcaagattactgtggatggcccgcgcgaaccccgaaacagaaccgagaagcattccacaatgcctgactctccagtcgatgtgaaaactcagagcaggctgacaccccctaccatgccacccccgcctaccacgcagggggcaccccggacttcctcatttacaccaaccactctcacaaatggaaccagtcacagccctacggctttaaacggtgccccctctccacccaatggcttctccaacgggccttcaagcagttcttccagctcgctggcgaatcagcaacttccaccggcctgcggagcacgtcagttgtctaagctgaaacgctttctaaccacactccagcagttcggcaacgacatctcccccgagattggtgaaagagtgaggactctggtccttgggctggttaattcaaccttgacaatcgaggaatttcatagtaagctccaagaggctactaacttccctctgcggccatttgtgatacccttcttaaaagccaacctgcctctccttcagcgagagctgttgcactgtgctcgcctagccaagcagaatccagcacagtacctggcccaacacgaacagctcctgcttgatgctagcaccacatcccccgtagactctagcgagctgttgctcgacgtgaacgaaaatggaaagagaaggaccccggatcggactaaagagaacggcttcgaccgcgaacctctgcattcagagcacccaagtaagagaccctgcacgatctcccctggccagaggtatagccccaataacgggttatcttaccaaccaaatggactgcctcatcccacaccaccgcctccccagcactatcgtctagatgacatggcgattgcacaccattaccgggattcatatcgacacccaagtcatagagacctcagggatcgcaaccggcccatgggtctgcacggcaccagacaggaggaaatgatcgaccataggcttactgatcgcgagtgggccgaagagtggaaacacttggaccatctgctcaattgtattatggatatggtcgaaaagacccgacggagcctgacagtgcttcgtagatgccaggaggctgacagggaggaactgaactactggatccgccggtactccgacgccgaggatttgaaaaagggcggagggtcttcgagctcccactcaagacaacagagtcctgttaatccagaccccgtggcactcgatgcccacagggaatttctgcatcgacctgcttctggttatgtcccggaggaaatatggaaaaaggccgaggaggcagtgaacgaagtaaagcgccaggcgatgaccgagttacagaaagctgttagcgaagccgagcggaaggcacacgacatgattactacagagagagccaaaatggaaaggacggtggctgaggccaagcgtcaagcagctgaagatgccctggcggtcatcaatcagcaggaggactcctcagaaagctgttggaactgcgggcgcaaagcctctgagacctgttccggctgcaatactgctcggtactgtggaagtttctgccagcacaaggattgggagaagcatcaccatatttgcggccaaacactacaggcacagcagcaaggggacaccccagccgtgtctagctccgtcacacccaactcaggagctggtagtcctatggatactccacccgccgcaacccctagaagcacgaccccgggcacaccctcgactatcgaaaccacaccaaggtgatgatgaggactagtccctgttcccagagcccacttttttttctttttttgaaataaaatagcctgtctttcagatctcaaaggctcttttcagagccaccaaaaaaaaaaaaaaaaaaaaaaaaaaaaaaaaaaaaaaaaaaaaaaaaaaaaaaaaaaaaaaaaaaaaaaaaaaaaaaaaaaaaaaaaaaaaaaaaaaaaagaatt

SEQ ID NO: 1305 - RNA, 1057 nt, synthetic construct
  misc_feature 1..1057: note = Artificial____RUNX1(1-241)_RUNX1T1b(short) mRNA opt3
  source 1..1057: mol_type = other RNA
aggagagtcccgcagtcggcgtccagcggctctgcttgttcgtgtgtgtgtcgttgcaggccttattcaagcttaccatgagaatccccgtggacgccagcacctccaggcggttcacacctccatctactgctctgtcaccgggcaagatgagtgaggcactcccccttggggcccctgatgcgggagctgccctggcaggtaaattgcgcagcggcgaccgatccatggtcgaagttttagccgatcacccaggggagctggtgcgtacggactctcccaactttctatgctcggtactccctacccattggagatgtaataagacactgccaattgctttcaaagtggtcgcacttggagatgtgcccgacggcactctggttaccgtgatggccggtaacgatgaaaattactcagctgagttgaggaacgccacagcggcaatgaagaatcaggtcgcccggtttaacgacctccgcttcgtggggagaagcggaaggggcaaaagttttaccctgactataacagtattcaccaatcctccacaagttgctacgtatcaccgggccatcaagattactgtggatggcccgcgcgaaccccgaagacataggcagaagctggacgatcagaccaaacctgggtccctctcttttagcgagcggttatccgagctggaacagcttcgtcgcacagcaatgagagtctcaccacaccatcccgctcctactccaaaccccagggccagtttgaatcacagcaccgcgttcaacccgcaacctcagtctcagatgcaggaggtgggattttgccacgtggcccaagtcggtctgaagctactcggctgatgatgaggactagtccctgttcccagagcccacttttttttctttttttgaaataaaatagcctgtctttcagatctcaaaggctcttttcagagccaccaaaaaaaaaaaaaaaaaaaaaaaaaaaaaaaaaaaaaaaaaaaaaaaaaaaaaaaaaaaaaaaaaaaaaaaaaaaaaaaaaaaaaaaaaaaaaaaaaaaaagaatt

SEQ ID NO: 1306 - RNA, 2761 nt, synthetic construct
  misc_feature 1..2761: note = Artificial____RUNX1(1-241)_V_RUNX1T1b(22-604) mRNA opt3
  source 1..2761: mol_type = other RNA
aggagagtcccgcagtcggcgtccagcggctctgcttgttcgtgtgtgtgtcgttgcaggccttattcaagcttaccatgagaatccccgtggacgccagcacctccaggcggttcacacctccatctactgctctgtcaccgggcaagatgagtgaggcactcccccttggggcccctgatgcgggagctgccctggcaggtaaattgcgcagcggcgaccgatccatggtcgaagttttagccgatcacccaggggagctggtgcgtacggactctcccaactttctatgctcggtactccctacccattggagatgtaataagacactgccaattgctttcaaagtggtcgcacttggagatgtgcccgacggcactctggttaccgtgatggccggtaacgatgaaaattactcagctgagttgaggaacgccacagcggcaatgaagaatcaggtcgcccggtttaacgacctccgcttcgtggggagaagcggaaggggcaaaagttttaccctgactataacagtattcaccaatcctccacaagttgctacgtatcaccgggccatcaagattactgtggatggcccgcgcgaaccccgaagacataggcagaagctggacgatcagaccaaacctgggtccctctcttttagcgagcggttatccgagctggaacagcttcgtcgcacagcaatgagagtctcaccacaccatcccgctcctactccaaaccccagggccagtttgaatcacagcaccgcgttcaacccgcaacctcagtctcagatgcaagtgggacccgagaagcgggtgccagccatgcctggttcccccgtcgaagttaaaatccagtcacgaagcagtccacccacaatgcctccactgccgcccattaatcctggcgggccacgccccgtgtcttttacccctacggcactatccaacggaatcaatcacagcccacccactctcaacggcgctccgtcgcctccacagagattctctaatggtcccgcctcctcaacaagtagcgctctgaccaaccagcagcttcctgccacttgcggggcaaggcaactgtccaagttgaaacggtttctcacaaccctgcagcagttcggaaacgacatatctcccgagatcggcgagaaggtacgcacgttagtgctggccctcgtcaatagcaccgtgacaattgaagagtttcattgtaagctacaagaagctactaacttcccactgagacctttcgttatcccctttttgaaagcgaatctaccactgctccagagggagctgcttcactgcgcacgtgccgctaagcagaccccgtcacagtacctggcccaacatgaacacttgctcctgaacacaagtattgcatcccctgccgatagctctgagttactgatggaggtgcacggcaatgggaaacggccctcaccagaacgaagagaggaaaacagtttcgacagggacactatcgctcccgagcctccagccaagcgcgtctgtaccataagccccgcacctcggcattccccggcgctaacagtgccactcatgaatcccggaggtcagtttcaccctaccccaccccctctgcagcattatactcttgaagatattgctacgtctcacttgtacagagagccgaacaaaatgctggagcatagggaagtacgcgaccgacaccactcgctcggcctgaatgggggatatcaggatgagcttgttgaccatcggctgacagaacgtgagtgggccgatgaatggaagcacttggaccatgcactcaactgcatcatggagatggtggagaaaaccagaaggagcatggccgtcctgcgccggtgtcaagaatccgatagagaggaattaaattactggaagaggcgatataacgagaatactgagctgcgcaagaccggcacagaacttgtgtcacggcagcacagtcccggttctgctgacagcctctccaacgattcacagagagagttcaatagcaggccagggaccggctacgtccctgtggaattttggaaaaagactgaggaagccgttaacaaagtgaagattcaggcaatgtctgaggtacaaaaagctgtcgccgaggcggaacagaaggccttcgaggtgatcgctacagaacgtgcacgcatggagcagacgatcgccgacgttaagcggcaggctgccgaagatgcatttctggtgattaacgagcaagaggaatccaccgagaattgctggaactgtggaagaaaagcgagtgaaacttgcagcggctgtaatatagccaggtactgcgggtctttctgccagcacaaggactgggagcgacatcaccggctttgtggacagaacttgcatggtcaatcaccccacggccaggggcgcccactgctccctgtcggaagaggctccagtgctaggagcgccgactgctcggtgccctccccagcactggataaaacatctgctaccacaagccggtcaagtactccggcctccgtaaccgcaatcgacacgaatggtttatgatgatgaggactagtccctgttcccagagcccacttttttttctttttttgaaataaaatagcctgtctttcagatctcaaaggctcttttcagagccaccaaaaaaaaaaaaaaaaaaaaaaaaaaaaaaaaaaaaaaaaaaaaaaaaaaaaaaaaaaaaaaaaaaaaaaaaaaaaaaaaaaaaaaaaaaaaaaaaaaaaagaatt

SEQ ID NO: 1307 - RNA, 2761 nt, synthetic construct
  misc_feature 1..2761: note = Artificial____RUNX1(1-241)_I_RUNX1T1b(22-604) mRNA opt3
  source 1..2761: mol_type = other RNA
aggagagtcccgcagtcggcgtccagcggctctgcttgttcgtgtgtgtgtcgttgcaggccttattcaagcttaccatgagaatccccgtggacgccagcacctccaggcggttcacacctccatctactgctctgtcaccgggcaagatgagtgaggcactcccccttggggcccctgatgcgggagctgccctggcaggtaaattgcgcagcggcgaccgatccatggtcgaagttttagccgatcacccaggggagctggtgcgtacggactctcccaactttctatgctcggtactccctacccattggagatgtaataagacactgccaattgctttcaaagtggtcgcacttggagatgtgcccgacggcactctggttaccgtgatggccggtaacgatgaaaattactcagctgagttgaggaacgccacagcggcaatgaagaatcaggtcgcccggtttaacgacctccgcttcgtggggagaagcggaaggggcaaaagttttaccctgactataacagtattcaccaatcctccacaagttgctacgtatcaccgggccatcaagattactgtggatggcccgcgcgaaccccgaagacataggcagaagctggacgatcagaccaaacctgggtccctctcttttagcgagcggttatccgagctggaacagcttcgtcgcacagcaatgagagtctcaccacaccatcccgctcctactccaaaccccagggccagtttgaatcacagcaccgcgttcaacccgcaacctcagtctcagatgcagatcggacccgagaagcgggtgccagccatgcctggttcccccgtggaagtcaaaattcaatcacgaagcagtccacccacaatgcctccactgccgcccatcaatcctggcgggccacgccccgtttcttttacccctacggcactatccaacggaataaatcacagcccacccactctcaacggcgctccgtcgcctccacagagattctctaatggtcccgcctcctcaacaagtagcgctctgaccaaccagcagcttcctgccacttgcggggcaaggcaactgtccaagttgaaacggtttctcacaaccctgcagcagttcggaaacgacatctctcccgagattggcgagaaggtgcgcacgttagtactggccctcgtgaatagcaccgtcacaatcgaagagtttcattgtaagctacaagaagctactaacttcccactgagacctttcgtgattccctttttgaaagcgaatctaccactgctccagagggagctgcttcactgcgcacgtgccgctaagcagaccccgtcacagtacctggcccaacatgaacacttgctcctgaacacaagtatcgcatcccctgccgatagctctgagttactgatggaggttcacggcaatgggaaacggccctcaccagaacgaagagaggaaaacagtttcgacagggacactatagctcccgagcctccagccaagcgcgtgtgtaccattagccccgcacctcggcattccccggcgctaacagtcccactcatgaatcccggaggtcagtttcaccctaccccaccccctctgcagcattatactcttgaagatatcgctacgtctcacttgtacagagagccgaacaaaatgctggagcatagggaagtgcgcgaccgacaccactcgctcggcctgaatgggggatatcaggatgagcttgtagaccatcggctgacagaacgtgagtgggccgatgaatggaagcacttggaccatgcactcaactgcattatggagatggttgagaaaaccagaaggagcatggccgtgctgcgccggtgtcaagaatccgatagagaggaattaaattactggaagaggcgatataacgagaatactgagctgcgcaagaccggcacagaacttgtctcacggcagcacagtcccggttctgctgacagcctctccaacgattcacagagagagttcaatagcaggccagggaccggctacgtgcctgtcgaattttggaaaaagactgaggaagccgtgaacaaagttaagatccaggcaatgtctgaggtgcaaaaagctgtagccgaggcggaacagaaggccttcgaggtcatcgctacagaacgtgcacgcatggagcagacgattgccgacgtgaagcggcaggctgccgaagatgcatttctggttataaacgagcaagaggaatccaccgagaattgctggaactgtggaagaaaagcgagtgaaacttgcagcggctgtaatatcgccaggtactgcgggtctttctgccagcacaaggactgggagcgacatcaccggctttgtggacagaacttgcatggtcaatcaccccacggccaggggcgcccactgctccctgtgggaagaggctccagtgctaggagcgccgactgctcggtcccctccccagcactggataaaacatctgctaccacaagccggtcaagtactccggcctccgtgaccgcaattgacacgaatggtttatgatgatgaggactagtccctgttcccagagcccacttttttttctttttttgaaataaaatagcctgtctttcagatctcaaaggctcttttcagagccaccaaaaaaaaaaaaaaaaaaaaaaaaaaaaaaaaaaaaaaaaaaaaaaaaaaaaaaaaaaaaaaaaaaaaaaaaaaaaaaaaaaaaaaaaaaaaaaaaaaaaagaatt

SEQ ID NO: 1308 - RNA, 1645 nt, synthetic construct
  misc_feature 1..1645: note = Homo sapiens__Q01196-1__RUNX1(K83E_R174Q) mRNA opt4
  source 1..1645: mol_type = other RNA
aggagagtcccgcagtcggcgtccagcggctctgcttgttcgtgtgtgtgtcgttgcaggccttattcaagcttaccatgagaatccccgtggacgccagcaccagcagaagattcaccccccccagcaccgccctgagccccggcaagatgagcgaggccctgcccctgggcgcccccgacgccggcgccgccctggccggcaagctgagaagcggcgacagaagcatggtggaggtgctggccgaccaccccggcgagctggtgagaaccgacagccccaacttcctgtgcagcgtgctgcccacccactggagatgcaacgagaccctgcccatcgccttcaaggtggtggccctgggcgacgtgcccgacggcaccctggtgaccgtgatggccggcaacgacgagaactacagcgccgagctgagaaacgccaccgccgccatgaagaaccaggtggccagattcaacgacctgagattcgtgggcagaagcggcagaggcaagagcttcaccctgaccatcaccgtgttcaccaaccccccccaggtggccacctaccacagagccatcaagatcaccgtggacggcccccaggagcccagaagacacagacagaagctggacgaccagaccaagcccggcagcctgagcttcagcgagagactgagcgagctggagcagctgagaagaaccgccatgagagtgagcccccaccaccccgcccccacccccaaccccagagccagcctgaaccacagcaccgccttcaacccccagccccagagccagatgcaggacaccagacagatccagcccagccccccctggagctacgaccagagctaccagtacctgggcagcatcgccagccccagcgtgcaccccgccacccccatcagccccggcagagccagcggcatgaccaccctgagcgccgagctgagcagcagactgagcaccgcccccgacctgaccgccttcagcgaccccagacagttccccgccctgcccagcatcagcgaccccagaatgcactaccccggcgccttcacctacagccccacccccgtgaccagcggcatcggcatcggcatgagcgccatgggcagcgccaccagataccacacctacctgccccccccctaccccggcagcagccaggcccagggcggccccttccaggccagcagccccagctaccacctgtactacggcgccagcgccggcagctaccagttcagcatggtgggcggcgagagaagcccccccagaatcctgcccccctgcaccaacgccagcaccggcagcgccctgctgaaccccagcctgcccaaccagagcgacgtggtggaggccgagggcagccacagcaacagccccaccaacatggcccccagcgccagactggaggaggccgtgtggagaccctactgatgatgaggactagtccctgttcccagagcccacttttttttctttttttgaaataaaatagcctgtctttcagatctcaaaggctcttttcagagccaccaaaaaaaaaaaaaaaaaaaaaaaaaaaaaaaaaaaaaaaaaaaaaaaaaaaaaaaaaaaaaaaaaaaaaaaaaaaaaaaaaaaaaaaaaaaaaaaaaaaaagaatt

SEQ ID NO: 1309 - RNA, 2119 nt, synthetic construct
  misc_feature 1..2119: note = Homo sapiens____CBFbeta(1-165)_SMMHC(1527-1972) mRNA opt4
  source 1..2119: mol_type = other RNA
aggagagtcccgcagtcggcgtccagcggctctgcttgttcgtgtgtgtgtcgttgcaggccttattcaagcttaccatgcccagagtggtgcccgaccagagaagcaagttcgagaacgaggagttcttcagaaagctgagcagagagtgcgagatcaagtacaccggcttcagagacagaccccacgaggagagacaggccagattccagaacgcctgcagagacggcagaagcgagatcgccttcgtggccaccggcaccaacctgagcctgcagttcttccccgccagctggcagggcgagcagagacagacccccagcagagagtacgtggacctggagagagaggccggcaaggtgtacctgaaggcccccatgatcctgaacggcgtgtgcgtgatctggaagggctggatcgacctgcagagactggacggcatgggctgcctggagttcgacgaggagagagcccagcaggaggacgccctggcccagcaggccttcgaggaggccagaagaagaaccagagagttcgaggacagagacagaagccacagagaggagatggaggtgcacgagctggagaagagcaagagagccctggagacccagatggaggagatgaagacccagctggaggagctggaggacgagctgcaggccaccgaggacgccaagctgagactggaggtgaacatgcaggccctgaagggccagttcgagagagacctgcaggccagagacgagcagaacgaggagaagagaagacagctgcagagacagctgcacgagtacgagaccgagctggaggacgagagaaagcagagagccctggccgccgccgccaagaagaagctggagggcgacctgaaggacctggagctgcaggccgacagcgccatcaagggcagagaggaggccatcaagcagctgagaaagctgcaggcccagatgaaggacttccagagagagctggaggacgccagagccagcagagacgagatcttcgccaccgccaaggagaacgagaagaaggccaagagcctggaggccgacctgatgcagctgcaggaggacctggccgccgccgagagagccagaaagcaggccgacctggagaaggaggagctggccgaggagctggccagcagcctgagcggcagaaacgccctgcaggacgagaagagaagactggaggccagaatcgcccagctggaggaggagctggaggaggagcagggcaacatggaggccatgagcgacagagtgagaaaggccacccagcaggccgagcagctgagcaacgagctggccaccgagagaagcaccgcccagaagaacgagagcgccagacagcagctggagagacagaacaaggagctgagaagcaagctgcacgagatggagggcgccgtgaagagcaagttcaagagcaccatcgccgccctggaggccaagatcgcccagctggaggagcaggtggagcaggaggccagagagaagcaggccgccaccaagagcctgaagcagaaggacaagaagctgaaggagatcctgctgcaggtggaggacgagagaaagatggccgagcagtacaaggagcaggccgagaagggcaacgccagagtgaagcagctgaagagacagctggaggaggccgaggaggagagccagagaatcaacgccaacagaagaaagctgcagagagagctggacgaggccaccgagagcaacgaggccatgggcagagaggtgaacgccctgaagagcaagctgagaagaggcaacgagaccagcttcgtgcccagcagaagaagcggcggcagaagagtgatcgagaacgccgacggcagcgaggaggagaccgacaccagagacgccgacttcaacggcaccaaggccagcgagtgatgatgaggactagtccctgttcccagagcccacttttttttctttttttgaaataaaatagcctgtctttcagatctcaaaggctcttttcagagccaccaaaaaaaaaaaaaaaaaaaaaaaaaaaaaaaaaaaaaaaaaaaaaaaaaaaaaaaaaaaaaaaaaaaaaaaaaaaaaaaaaaaaaaaaaaaaaaaaaaaaagaatt

SEQ ID NO: 1310 - RNA, 1834 nt, synthetic construct
  misc_feature 1..1834: note = Artificial____CBFbeta(1-165)_SMMHC(1527-1877) mRNA opt4
  source 1..1834: mol_type = other RNA
aggagagtcccgcagtcggcgtccagcggctctgcttgttcgtgtgtgtgtcgttgcaggccttattcaagcttaccatgcccagagtggtgcccgaccagagaagcaagttcgagaacgaggagttcttcagaaagctgagcagagagtgcgagatcaagtacaccggcttcagagacagaccccacgaggagagacaggccagattccagaacgcctgcagagacggcagaagcgagatcgccttcgtggccaccggcaccaacctgagcctgcagttcttccccgccagctggcagggcgagcagagacagacccccagcagagagtacgtggacctggagagagaggccggcaaggtgtacctgaaggcccccatgatcctgaacggcgtgtgcgtgatctggaagggctggatcgacctgcagagactggacggcatgggctgcctggagttcgacgaggagagagcccagcaggaggacgccctggcccagcaggccttcgaggaggccagaagaagaaccagagagttcgaggacagagacagaagccacagagaggagatggaggtgcacgagctggagaagagcaagagagccctggagacccagatggaggagatgaagacccagctggaggagctggaggacgagctgcaggccaccgaggacgccaagctgagactggaggtgaacatgcaggccctgaagggccagttcgagagagacctgcaggccagagacgagcagaacgaggagaagagaagacagctgcagagacagctgcacgagtacgagaccgagctggaggacgagagaaagcagagagccctggccgccgccgccaagaagaagctggagggcgacctgaaggacctggagctgcaggccgacagcgccatcaagggcagagaggaggccatcaagcagctgagaaagctgcaggcccagatgaaggacttccagagagagctggaggacgccagagccagcagagacgagatcttcgccaccgccaaggagaacgagaagaaggccaagagcctggaggccgacctgatgcagctgcaggaggacctggccgccgccgagagagccagaaagcaggccgacctggagaaggaggagctggccgaggagctggccagcagcctgagcggcagaaacgccctgcaggacgagaagagaagactggaggccagaatcgcccagctggaggaggagctggaggaggagcagggcaacatggaggccatgagcgacagagtgagaaaggccacccagcaggccgagcagctgagcaacgagctggccaccgagagaagcaccgcccagaagaacgagagcgccagacagcagctggagagacagaacaaggagctgagaagcaagctgcacgagatggagggcgccgtgaagagcaagttcaagagcaccatcgccgccctggaggccaagatcgcccagctggaggagcaggtggagcaggaggccagagagaagcaggccgccaccaagagcctgaagcagaaggacaagaagctgaaggagatcctgctgcaggtggaggacgagagaaagatggccgagcagtacaaggagcaggccgagaagggcaacgcctgatgatgaggactagtccctgttcccagagcccacttttttttctttttttgaaataaaatagcctgtctttcagatctcaaaggctcttttcagagccaccaaaaaaaaaaaaaaaaaaaaaaaaaaaaaaaaaaaaaaaaaaaaaaaaaaaaaaaaaaaaaaaaaaaaaaaaaaaaaaaaaaaaaaaaaaaaaaaaaaaaagaatt

SEQ ID NO: 1311 - RNA, 895 nt, synthetic construct
  misc_feature 1..895: note = Artificial____CBFbeta(1-165)_Linker_Lifeact mRNA opt4
  source 1..895: mol_type = other RNA
aggagagtcccgcagtcggcgtccagcggctctgcttgttcgtgtgtgtgtcgttgcaggccttattcaagcttaccatgcccagagtggtgcccgaccagagaagcaagttcgagaacgaggagttcttcagaaagctgagcagagagtgcgagatcaagtacaccggcttcagagacagaccccacgaggagagacaggccagattccagaacgcctgcagagacggcagaagcgagatcgccttcgtggccaccggcaccaacctgagcctgcagttcttccccgccagctggcagggcgagcagagacagacccccagcagagagtacgtggacctggagagagaggccggcaaggtgtacctgaaggcccccatgatcctgaacggcgtgtgcgtgatctggaagggctggatcgacctgcagagactggacggcatgggctgcctggagttcgacgaggagagagcccagcaggaggacgccctggcccagcaggccttcgaggaggccagaagaagaaccagagagttcgaggacagagacagaagccacagagaggagatggagggcggcagcggcggcagcggcggcagcggcggcagcggcggcggcggcgtggccgacctgatcaagaagttcgagagcatcagcaaggaggagggcgacccccccgtggccacctgatgatgaggactagtccctgttcccagagcccacttttttttctttttttgaaataaaatagcctgtctttcagatctcaaaggctcttttcagagccaccaaaaaaaaaaaaaaaaaaaaaaaaaaaaaaaaaaaaaaaaaaaaaaaaaaaaaaaaaaaaaaaaaaaaaaaaaaaaaaaaaaaaaaaaaaaaaaaaaaaaagaatt

SEQ ID NO: 1312 - RNA, 862 nt, synthetic construct
  misc_feature 1..862: note = Artificial____CBFbeta(1-165)_HIF1alpha(549-575) mRNA opt4
  source 1..862: mol_type = other RNA
aggagagtcccgcagtcggcgtccagcggctctgcttgttcgtgtgtgtgtcgttgcaggccttattcaagcttaccatgcccagagtggtgcccgaccagagaagcaagttcgagaacgaggagttcttcagaaagctgagcagagagtgcgagatcaagtacaccggcttcagagacagaccccacgaggagagacaggccagattccagaacgcctgcagagacggcagaagcgagatcgccttcgtggccaccggcaccaacctgagcctgcagttcttccccgccagctggcagggcgagcagagacagacccccagcagagagtacgtggacctggagagagaggccggcaaggtgtacctgaaggcccccatgatcctgaacggcgtgtgcgtgatctggaagggctggatcgacctgcagagactggacggcatgggctgcctggagttcgacgaggagagagcccagcaggaggacgccctggcccagcaggccttcgaggaggccagaagaagaaccagagagttcgaggacagagacagaagccacagagaggagatggagcccttcagcacccaggacaccgacctggacctggagatgctggccccctacatccccatggacgacgacttccagctgagatgatgatgaggactagtccctgttcccagagcccacttttttttctttttttgaaataaaatagcctgtctttcagatctcaaaggctcttttcagagccaccaaaaaaaaaaaaaaaaaaaaaaaaaaaaaaaaaaaaaaaaaaaaaaaaaaaaaaaaaaaaaaaaaaaaaaaaaaaaaaaaaaaaaaaaaaaaaaaaaaaaagaatt

SEQ ID NO: 1313 - RNA, 907 nt, synthetic construct
  misc_feature 1..907: note Artificial____CBFbeta(1-165)_Linker_HIF1alpha(549-575) mRNA opt4
  source 1..907: mol_type = other RNA
aggagagtcccgcagtcggcgtccagcggctctgcttgttcgtgtgtgtgtcgttgcaggccttattcaagcttaccatgcccagagtggtgcccgaccagagaagcaagttcgagaacgaggagttcttcagaaagctgagcagagagtgcgagatcaagtacaccggcttcagagacagaccccacgaggagagacaggccagattccagaacgcctgcagagacggcagaagcgagatcgccttcgtggccaccggcaccaacctgagcctgcagttcttccccgccagctggcagggcgagcagagacagacccccagcagagagtacgtggacctggagagagaggccggcaaggtgtacctgaaggcccccatgatcctgaacggcgtgtgcgtgatctggaagggctggatcgacctgcagagactggacggcatgggctgcctggagttcgacgaggagagagcccagcaggaggacgccctggcccagcaggccttcgaggaggccagaagaagaaccagagagttcgaggacagagacagaagccacagagaggagatggagggcggcagcggcggcagcggcggcagcggcggcagcggcggcggccccttcagcacccaggacaccgacctggacctggagatgctggccccctacatccccatggacgacgacttccagctgagatgatgatgaggactagtccctgttcccagagcccacttttttttctttttttgaaataaaatagcctgtctttcagatctcaaaggctcttttcagagccaccaaaaaaaaaaaaaaaaaaaaaaaaaaaaaaaaaaaaaaaaaaaaaaaaaaaaaaaaaaaaaaaaaaaaaaaaaaaaaaaaaaaaaaaaaaaaaaaaaaaaagaatt

SEQ ID NO: 1314 - RNA, 2542 nt, synthetic construct
  misc_feature 1..2542: note = Artificial____RUNX1(1-177)_N_RUNX1T1a(31-604) mRNA opt4
  source 1..2542: mol_type = other RNA
aggagagtcccgcagtcggcgtccagcggctctgcttgttcgtgtgtgtgtcgttgcaggccttattcaagcttaccatgagaatccccgtggacgccagcaccagcagaagattcaccccccccagcaccgccctgagccccggcaagatgagcgaggccctgcccctgggcgcccccgacgccggcgccgccctggccggcaagctgagaagcggcgacagaagcatggtggaggtgctggccgaccaccccggcgagctggtgagaaccgacagccccaacttcctgtgcagcgtgctgcccacccactggagatgcaacaagaccctgcccatcgccttcaaggtggtggccctgggcgacgtgcccgacggcaccctggtgaccgtgatggccggcaacgacgagaactacagcgccgagctgagaaacgccaccgccgccatgaagaaccaggtggccagattcaacgacctgagattcgtgggcagaagcggcagaggcaagagcttcaccctgaccatcaccgtgttcaccaaccccccccaggtggccacctaccacagagccatcaagatcaccgtggacggccccagagagcccagaaacagaaccgagaagcacagcaccatgcccgacagccccgtggacgtgaagacccagagcagactgaccccccccaccatgccccccccccccaccacccagggcgcccccagaaccagcagcttcacccccaccaccctgaccaacggcaccagccacagccccaccgccctgaacggcgcccccagcccccccaacggcttcagcaacggccccagcagcagcagcagcagcagcctggccaaccagcagctgccccccgcctgcggcgccagacagctgagcaagctgaagagattcctgaccaccctgcagcagttcggcaacgacatcagccccgagatcggcgagagagtgagaaccctggtgctgggcctggtgaacagcaccctgaccatcgaggagttccacagcaagctgcaggaggccaccaacttccccctgagacccttcgtgatccccttcctgaaggccaacctgcccctgctgcagagagagctgctgcactgcgccagactggccaagcagaaccccgcccagtacctggcccagcacgagcagctgctgctggacgccagcaccaccagccccgtggacagcagcgagctgctgctggacgtgaacgagaacggcaagagaagaacccccgacagaaccaaggagaacggcttcgacagagagcccctgcacagcgagcaccccagcaagagaccctgcaccatcagccccggccagagatacagccccaacaacggcctgagctaccagcccaacggcctgccccaccccacccccccccccccccagcactacagactggacgacatggccatcgcccaccactacagagacagctacagacaccccagccacagagacctgagagacagaaacagacccatgggcctgcacggcaccagacaggaggagatgatcgaccacagactgaccgacagagagtgggccgaggagtggaagcacctggaccacctgctgaactgcatcatggacatggtggagaagaccagaagaagcctgaccgtgctgagaagatgccaggaggccgacagagaggagctgaactactggatcagaagatacagcgacgccgaggacctgaagaagggcggcggcagcagcagcagccacagcagacagcagagccccgtgaaccccgaccccgtggccctggacgcccacagagagttcctgcacagacccgccagcggctacgtgcccgaggagatctggaagaaggccgaggaggccgtgaacgaggtgaagagacaggccatgaccgagctgcagaaggccgtgagcgaggccgagagaaaggcccacgacatgatcaccaccgagagagccaagatggagagaaccgtggccgaggccaagagacaggccgccgaggacgccctggccgtgatcaaccagcaggaggacagcagcgagagctgctggaactgcggcagaaaggccagcgagacctgcagcggctgcaacaccgccagatactgcggcagcttctgccagcacaaggactgggagaagcaccaccacatctgcggccagaccctgcaggcccagcagcagggcgacacccccgccgtgagcagcagcgtgacccccaacagcggcgccggcagccccatggacaccccccccgccgccacccccagaagcaccacccccggcacccccagcaccatcgagaccacccccagatgatgatgaggactagtccctgttcccagagcccacttttttttctttttttgaaataaaatagcctgtctttcagatctcaaaggctcttttcagagccaccaaaaaaaaaaaaaaaaaaaaaaaaaaaaaaaaaaaaaaaaaaaaaaaaaaaaaaaaaaaaaaaaaaaaaaaaaaaaaaaaaaaaaaaaaaaaaaaaaaaaagaatt

SEQ ID NO: 1315 - RNA, 1057 nt, synthetic construct
  misc_feature 1..1057: note = Artificial____RUNX1(1-241)_RUNX1T1b(short) mRNA opt4
  source 1..1057: mol_type = other RNA
aggagagtcccgcagtcggcgtccagcggctctgcttgttcgtgtgtgtgtcgttgcaggccttattcaagcttaccatgagaatccccgtggacgccagcaccagcagaagattcaccccccccagcaccgccctgagccccggcaagatgagcgaggccctgcccctgggcgcccccgacgccggcgccgccctggccggcaagctgagaagcggcgacagaagcatggtggaggtgctggccgaccaccccggcgagctggtgagaaccgacagccccaacttcctgtgcagcgtgctgcccacccactggagatgcaacaagaccctgcccatcgccttcaaggtggtggccctgggcgacgtgcccgacggcaccctggtgaccgtgatggccggcaacgacgagaactacagcgccgagctgagaaacgccaccgccgccatgaagaaccaggtggccagattcaacgacctgagattcgtgggcagaagcggcagaggcaagagcttcaccctgaccatcaccgtgttcaccaaccccccccaggtggccacctaccacagagccatcaagatcaccgtggacggccccagagagcccagaagacacagacagaagctggacgaccagaccaagcccggcagcctgagcttcagcgagagactgagcgagctggagcagctgagaagaaccgccatgagagtgagcccccaccaccccgcccccacccccaaccccagagccagcctgaaccacagcaccgccttcaacccccagccccagagccagatgcaggaggtgggcttctgccacgtggcccaggtgggcctgaagctgctgggctgatgatgaggactagtccctgttcccagagcccacttttttttctttttttgaaataaaatagcctgtctttcagatctcaaaggctcttttcagagccaccaaaaaaaaaaaaaaaaaaaaaaaaaaaaaaaaaaaaaaaaaaaaaaaaaaaaaaaaaaaaaaaaaaaaaaaaaaaaaaaaaaaaaaaaaaaaaaaaaaaaagaatt

SEQ ID NO: 1316 - RNA, 2761 nt, synthetic construct
  misc_feature 1..2761: note = Artificial____RUNX1(1-241)_V_RUNX1T1b(22-604) mRNA opt4
  source 1..2761: mol_type = other RNA
aggagagtcccgcagtcggcgtccagcggctctgcttgttcgtgtgtgtgtcgttgcaggccttattcaagcttaccatgagaatccccgtggacgccagcaccagcagaagattcaccccccccagcaccgccctgagccccggcaagatgagcgaggccctgcccctgggcgcccccgacgccggcgccgccctggccggcaagctgagaagcggcgacagaagcatggtggaggtgctggccgaccaccccggcgagctggtgagaaccgacagccccaacttcctgtgcagcgtgctgcccacccactggagatgcaacaagaccctgcccatcgccttcaaggtggtggccctgggcgacgtgcccgacggcaccctggtgaccgtgatggccggcaacgacgagaactacagcgccgagctgagaaacgccaccgccgccatgaagaaccaggtggccagattcaacgacctgagattcgtgggcagaagcggcagaggcaagagcttcaccctgaccatcaccgtgttcaccaaccccccccaggtggccacctaccacagagccatcaagatcaccgtggacggccccagagagcccagaagacacagacagaagctggacgaccagaccaagcccggcagcctgagcttcagcgagagactgagcgagctggagcagctgagaagaaccgccatgagagtgagcccccaccaccccgcccccacccccaaccccagagccagcctgaaccacagcaccgccttcaacccccagccccagagccagatgcaggtgggccccgagaagagagtgcccgccatgcccggcagccccgtggaggtgaagatccagagcagaagcagcccccccaccatgccccccctgccccccatcaaccccggcggccccagacccgtgagcttcacccccaccgccctgagcaacggcatcaaccacagcccccccaccctgaacggcgcccccagccccccccagagattcagcaacggccccgccagcagcaccagcagcgccctgaccaaccagcagctgcccgccacctgcggcgccagacagctgagcaagctgaagagattcctgaccaccctgcagcagttcggcaacgacatcagccccgagatcggcgagaaggtgagaaccctggtgctggccctggtgaacagcaccgtgaccatcgaggagttccactgcaagctgcaggaggccaccaacttccccctgagacccttcgtgatccccttcctgaaggccaacctgcccctgctgcagagagagctgctgcactgcgccagagccgccaagcagacccccagccagtacctggcccagcacgagcacctgctgctgaacaccagcatcgccagccccgccgacagcagcgagctgctgatggaggtgcacggcaacggcaagagacccagccccgagagaagagaggagaacagcttcgacagagacaccatcgcccccgagccccccgccaagagagtgtgcaccatcagccccgcccccagacacagccccgccctgaccgtgcccctgatgaaccccggcggccagttccaccccacccccccccccctgcagcactacaccctggaggacatcgccaccagccacctgtacagagagcccaacaagatgctggagcacagagaggtgagagacagacaccacagcctgggcctgaacggcggctaccaggacgagctggtggaccacagactgaccgagagagagtgggccgacgagtggaagcacctggaccacgccctgaactgcatcatggagatggtggagaagaccagaagaagcatggccgtgctgagaagatgccaggagagcgacagagaggagctgaactactggaagagaagatacaacgagaacaccgagctgagaaagaccggcaccgagctggtgagcagacagcacagccccggcagcgccgacagcctgagcaacgacagccagagagagttcaacagcagacccggcaccggctacgtgcccgtggagttctggaagaagaccgaggaggccgtgaacaaggtgaagatccaggccatgagcgaggtgcagaaggccgtggccgaggccgagcagaaggccttcgaggtgatcgccaccgagagagccagaatggagcagaccatcgccgacgtgaagagacaggccgccgaggacgccttcctggtgatcaacgagcaggaggagagcaccgagaactgctggaactgcggcagaaaggccagcgagacctgcagcggctgcaacatcgccagatactgcggcagcttctgccagcacaaggactgggagagacaccacagactgtgcggccagaacctgcacggccagagcccccacggccagggcagacccctgctgcccgtgggcagaggcagcagcgccagaagcgccgactgcagcgtgcccagccccgccctggacaagaccagcgccaccaccagcagaagcagcacccccgccagcgtgaccgccatcgacaccaacggcctgtgatgatgaggactagtccctgttcccagagcccacttttttttctttttttgaaataaaatagcctgtctttcagatctcaaaggctcttttcagagccaccaaaaaaaaaaaaaaaaaaaaaaaaaaaaaaaaaaaaaaaaaaaaaaaaaaaaaaaaaaaaaaaaaaaaaaaaaaaaaaaaaaaaaaaaaaaaaaaaaaaaagaatt

SEQ ID NO: 1317 - RNA, 2761 nt, synthetic construct
  misc_feature 1..2761: note = Artificial____RUNX1(1-241)_I_RUNX1T1b(22-604) mRNA opt4
  source 1..2761: mol_type = other RNA
aggagagtcccgcagtcggcgtccagcggctctgcttgttcgtgtgtgtgtcgttgcaggccttattcaagcttaccatgagaatccccgtggacgccagcaccagcagaagattcaccccccccagcaccgccctgagccccggcaagatgagcgaggccctgcccctgggcgcccccgacgccggcgccgccctggccggcaagctgagaagcggcgacagaagcatggtggaggtgctggccgaccaccccggcgagctggtgagaaccgacagccccaacttcctgtgcagcgtgctgcccacccactggagatgcaacaagaccctgcccatcgccttcaaggtggtggccctgggcgacgtgcccgacggcaccctggtgaccgtgatggccggcaacgacgagaactacagcgccgagctgagaaacgccaccgccgccatgaagaaccaggtggccagattcaacgacctgagattcgtgggcagaagcggcagaggcaagagcttcaccctgaccatcaccgtgttcaccaaccccccccaggtggccacctaccacagagccatcaagatcaccgtggacggccccagagagcccagaagacacagacagaagctggacgaccagaccaagcccggcagcctgagcttcagcgagagactgagcgagctggagcagctgagaagaaccgccatgagagtgagcccccaccaccccgcccccacccccaaccccagagccagcctgaaccacagcaccgccttcaacccccagccccagagccagatgcagatcggccccgagaagagagtgcccgccatgcccggcagccccgtggaggtgaagatccagagcagaagcagcccccccaccatgccccccctgccccccatcaaccccggcggccccagacccgtgagcttcacccccaccgccctgagcaacggcatcaaccacagcccccccaccctgaacggcgcccccagccccccccagagattcagcaacggccccgccagcagcaccagcagcgccctgaccaaccagcagctgcccgccacctgcggcgccagacagctgagcaagctgaagagattcctgaccaccctgcagcagttcggcaacgacatcagccccgagatcggcgagaaggtgagaaccctggtgctggccctggtgaacagcaccgtgaccatcgaggagttccactgcaagctgcaggaggccaccaacttccccctgagacccttcgtgatccccttcctgaaggccaacctgcccctgctgcagagagagctgctgcactgcgccagagccgccaagcagacccccagccagtacctggcccagcacgagcacctgctgctgaacaccagcatcgccagccccgccgacagcagcgagctgctgatggaggtgcacggcaacggcaagagacccagccccgagagaagagaggagaacagcttcgacagagacaccatcgcccccgagccccccgccaagagagtgtgcaccatcagccccgcccccagacacagccccgccctgaccgtgcccctgatgaaccccggcggccagttccaccccacccccccccccctgcagcactacaccctggaggacatcgccaccagccacctgtacagagagcccaacaagatgctggagcacagagaggtgagagacagacaccacagcctgggcctgaacggcggctaccaggacgagctggtggaccacagactgaccgagagagagtgggccgacgagtggaagcacctggaccacgccctgaactgcatcatggagatggtggagaagaccagaagaagcatggccgtgctgagaagatgccaggagagcgacagagaggagctgaactactggaagagaagatacaacgagaacaccgagctgagaaagaccggcaccgagctggtgagcagacagcacagccccggcagcgccgacagcctgagcaacgacagccagagagagttcaacagcagacccggcaccggctacgtgcccgtggagttctggaagaagaccgaggaggccgtgaacaaggtgaagatccaggccatgagcgaggtgcagaaggccgtggccgaggccgagcagaaggccttcgaggtgatcgccaccgagagagccagaatggagcagaccatcgccgacgtgaagagacaggccgccgaggacgccttcctggtgatcaacgagcaggaggagagcaccgagaactgctggaactgcggcagaaaggccagcgagacctgcagcggctgcaacatcgccagatactgcggcagcttctgccagcacaaggactgggagagacaccacagactgtgcggccagaacctgcacggccagagcccccacggccagggcagacccctgctgcccgtgggcagaggcagcagcgccagaagcgccgactgcagcgtgcccagccccgccctggacaagaccagcgccaccaccagcagaagcagcacccccgccagcgtgaccgccatcgacaccaacggcctgtgatgatgaggactagtccctgttcccagagcccacttttttttctttttttgaaataaaatagcctgtctttcagatctcaaaggctcttttcagagccaccaaaaaaaaaaaaaaaaaaaaaaaaaaaaaaaaaaaaaaaaaaaaaaaaaaaaaaaaaaaaaaaaaaaaaaaaaaaaaaaaaaaaaaaaaaaaaaaaaaaaagaatt

SEQ ID NO: 1318 - RNA, 1645 nt, synthetic construct
  misc_feature 1..1645: note = Homo sapiens__Q01196-1__RUNX1(K83E_R174Q) mRNA opt5
  source 1..1645: mol_type = other RNA
aggagagtcccgcagtcggcgtccagcggctctgcttgttcgtgtgtgtgtcgttgcaggccttattcaagcttaccatgagaatccccgtggacgccagcacctcccggcgcttcacacctccgtctacggctctgagccccggcaagatgtccgaggccctccctctgggggcgcccgatgctggagccgcccttgctggcaaactgagatctggggaccggagcatggtcgaagttctcgccgatcaccctggagagctggtgcgcaccgactcccccaactttctttgctctgtgctgcctacacattggagatgtaatgaaaccctcccgattgctttcaaggtcgtggccctgggcgatgttcccgacgggacactggtgaccgtcatggcgggaaacgatgagaattacagcgccgaactccggaacgctacagccgctatgaaaaatcaggtggcccgctttaacgacctgagattcgttggccggtccggccgcggaaagagctttacccttacgatcaccgtgttcacaaatcctccccaagtcgcgacctatcacagagccattaaaatcacagtggatgggcctcaggagccccggcgccatagacagaagctggacgatcagaccaagccgggctctctctcctttagcgagcggctgtctgaacttgagcaactgcgcagaacggctatgcgggtgtcccctcaccatcccgcccctacacccaaccccagagctagcctcaatcactctaccgccttcaaccctcagccgcagtcccagatgcaagacacacgccagattcagcccagccctccctggtcctacgatcagtcttatcaatacctggggagcatcgcctcccctagcgtccaccccgctaccccgatctctcctggacgggcgtccggcatgaccacactgagcgccgaactctctagcagactgtccacggctcccgaccttaccgccttttctgaccctcgccagttccccgccctgcctagcatttccgatccccggatgcattatccgggggcttttacatacagccctacccccgttacatctggaatcggcattggcatgtccgccatggggagcgcgaccagatatcacacgtacctgccccctccgtaccccggatcttcccaggctcaaggcgggcctttccaggccagctccccctcttatcatctctactatggagccagcgctggctcctaccagttttctatggtcgggggagagcgcagccctccccggatccttcctccctgcacaaatgcctccaccggcagcgctctgctcaacccgtctctgcctaatcagtccgacgtggtggaggccgaaggcagccactctaactcccccaccaatatggcgcctagcgccagactggaggaagctgtgtggcgcccctattgatgatgaggactagtccctgttcccagagcccacttttttttctttttttgaaataaaatagcctgtctttcagatctcaaaggctcttttcagagccaccaaaaaaaaaaaaaaaaaaaaaaaaaaaaaaaaaaaaaaaaaaaaaaaaaaaaaaaaaaaaaaaaaaaaaaaaaaaaaaaaaaaaaaaaaaaaaaaaaaaaagaatt

SEQ ID NO: 1319 - RNA, 2119 nt, synthetic construct
  misc_feature 1..2119: note = Homo sapiens____CBFbeta(1-165)_SMMHC(1527-1972) mRNA opt5
  source 1..2119: mol_type = other RNA
aggagagtcccgcagtcggcgtccagcggctctgcttgttcgtgtgtgtgtcgttgcaggccttattcaagcttaccatgcccagagtggtccctgaccagcggagcaagttcgagaacgaagagtttttccgcaaactgtccagagaatgcgagatcaagtacaccggctttcgggatcgcccgcacgaagagagacaagcccggttccagaatgcttgtcgcgacgggagatctgagattgcctttgttgcgacaggaacgaacctcagcctgcagttctttcccgcttcctggcagggcgaacaacggcagaccccttctcgcgagtatgtggatcttgaaagagaggccgggaaagtgtacctgaaggcccccatgatcctcaatggagtctgcgtgatttggaaaggctggatcgacctgcagcggcttgatgggatgggatgtctggagttcgacgaggaacgcgctcagcaagaagatgccctcgctcagcaggcctttgaggaagcgagacggcgcacaagagagttcgaggaccgggatagaagccatcgcgaagagatggaagttcacgagctggaaaagtccaagcgggccctggagacccagatggaggaaatgaaaacacaactcgaggaactggaggacgaacttcaggctaccgaggatgccaagctgagactcgaggtgaacatgcaggctctgaaaggccaatttgaacgcgaccttcaggcccgggatgagcagaatgaagagaagagacgccagctgcaacggcagctccatgagtatgaaacagagctggaagacgagagaaaacagcgcgcgctggccgctgccgctaagaagaaactcgaaggcgacctgaaggatcttgagctgcaggccgactctgccattaaagggcgggaggaagctatcaagcaactcagaaaactgcaggcgcagatgaaggatttccagcgcgagcttgaagacgcccgggctagcagagatgagatctttgccaccgccaaagaaaacgagaagaaggctaaatccctggaggccgacctcatgcaactgcaggaagatctggcggctgccgagcgggcccgcaagcaggctgacctcgaaaaagaggaactggccgaggagcttgctagctctctgtccggaagaaatgccctccaggatgaaaagcggagactggaggcgcgcattgcccaacttgaagaggagctggaagaggaacagggcaacatggaggctatgagcgaccgggtcagaaaagccacgcagcaagctgaacagctctctaatgagctggccaccgagcgctccacagcgcagaagaacgaaagcgccagacagcaactggagcggcagaataaggaactccgctctaaactgcacgagatggaaggggctgtgaagtccaaattcaagagcaccatcgccgctcttgaggccaaaattgcccagctggaggaacaggttgagcaagaagctagagagaagcaggcggccacaaagtccctcaaacagaaggataaaaagctgaaagaaatcctgcttcaggtggaggacgagcggaagatggctgaacaatacaaggagcaggccgaaaaaggaaacgcccgcgtcaagcagctcaaaagacaactggaggaggctgaagaggaatctcagcggattaatgccaaccgcagaaagctgcagcgggagctcgacgaagcgaccgagagcaatgaggctatgggccgcgaagtgaacgccctgaaatccaaacttagacgggggaacgagacgagcttcgtgccttctagacgctccggaggccggagagtcatcgaaaatgccgatggcagcgaggaagagacagacacccgcgatgctgactttaacgggacaaaggcctctgagtgatgatgaggactagtccctgttcccagagcccacttttttttctttttttgaaataaaatagcctgtctttcagatctcaaaggctcttttcagagccaccaaaaaaaaaaaaaaaaaaaaaaaaaaaaaaaaaaaaaaaaaaaaaaaaaaaaaaaaaaaaaaaaaaaaaaaaaaaaaaaaaaaaaaaaaaaaaaaaaaaaagaatt

SEQ ID NO: 1320 - RNA, 1834 nt, synthetic construct
  misc_feature 1..1834: note = Artificial____CBFbeta(1-165)_SMMHC(1527-1877) mRNA opt5
  source 1..1834: mol_type = other RNA
aggagagtcccgcagtcggcgtccagcggctctgcttgttcgtgtgtgtgtcgttgcaggccttattcaagcttaccatgcccagagtggtccctgaccagcggagcaagttcgagaacgaagagtttttccgcaaactgtccagagaatgcgagatcaagtacaccggctttcgggatcgcccgcacgaagagagacaagcccggttccagaatgcttgtcgcgacgggagatctgagattgcctttgttgcgacaggaacgaacctcagcctgcagttctttcccgcttcctggcagggcgaacaacggcagaccccttctcgcgagtatgtggatcttgaaagagaggccgggaaagtgtacctgaaggcccccatgatcctcaatggagtctgcgtgatttggaaaggctggatcgacctgcagcggcttgatgggatgggatgtctggagttcgacgaggaacgcgctcagcaagaagatgccctcgctcagcaggcctttgaggaagcgagacggcgcacaagagagttcgaggaccgggatagaagccatcgcgaagagatggaagttcacgagctggaaaagtccaagcgggccctggagacccagatggaggaaatgaaaacacaactcgaggaactggaggacgaacttcaggctaccgaggatgccaagctgagactcgaggtgaacatgcaggctctgaaaggccaatttgaacgcgaccttcaggcccgggatgagcagaatgaagagaagagacgccagctgcaacggcagctccatgagtatgaaacagagctggaagacgagagaaaacagcgcgcgctggccgctgccgctaagaagaaactcgaaggcgacctgaaggatcttgagctgcaggccgactctgccattaaagggcgggaggaagctatcaagcaactcagaaaactgcaggcgcagatgaaggatttccagcgcgagcttgaagacgcccgggctagcagagatgagatctttgccaccgccaaagaaaacgagaagaaggctaaatccctggaggccgacctcatgcaactgcaggaagatctggcggctgccgagcgggcccgcaagcaggctgacctcgaaaaagaggaactggccgaggagcttgctagctctctgtccggaagaaatgccctccaggatgaaaagcggagactggaggcgcgcattgcccaacttgaagaggagctggaagaggaacagggcaacatggaggctatgagcgaccgggtcagaaaagccacgcagcaagctgaacagctctctaatgagctggccaccgagcgctccacagcgcagaagaacgaaagcgccagacagcaactggagcggcagaataaggaactccgctctaaactgcacgagatggaaggggctgtgaagtccaaattcaagagcaccatcgccgctcttgaggccaaaattgcccagctggaggaacaggttgagcaagaagctagagagaagcaggcggccacaaagtccctcaaacagaaggataaaaagctgaaagaaatcctgcttcaggtggaggacgagcggaagatggctgaacaatacaaggagcaggccgaaaaaggaaacgcctgatgatgaggactagtccctgttcccagagcccacttttttttctttttttgaaataaaatagcctgtctttcagatctcaaaggctcttttcagagccaccaaaaaaaaaaaaaaaaaaaaaaaaaaaaaaaaaaaaaaaaaaaaaaaaaaaaaaaaaaaaaaaaaaaaaaaaaaaaaaaaaaaaaaaaaaaaaaaaaaaaagaatt

SEQ ID NO: 1321 - RNA, 895 nt, synthetic construct
  misc_feature 1..895: note = Artificial____CBFbeta(1-165)_Linker_Lifeact mRNA opt5
  source 1..895: mol_type = other RNA
aggagagtcccgcagtcggcgtccagcggctctgcttgttcgtgtgtgtgtcgttgcaggccttattcaagcttaccatgcccagagtggtccctgaccagcggagcaagttcgagaacgaagagtttttccgcaaactgtccagagaatgcgagatcaagtacaccggctttcgggatcgcccgcacgaagagagacaagcccggttccagaatgcttgtcgcgacgggagatctgagattgcctttgttgcgacaggaacgaacctcagcctgcagttctttcccgcttcctggcagggcgaacaacggcagaccccttctcgcgagtatgtggatcttgaaagagaggccgggaaagtgtacctgaaggcccccatgatcctcaatggagtctgcgtgatttggaaaggctggatcgacctgcagcggcttgatgggatgggatgtctggagttcgacgaggaacgcgctcagcaagaagatgccctcgctcagcaggcctttgaggaagcgagacggcgcacaagagagttcgaggaccgggatagaagccatcgcgaagagatggaaggcggctccgggggatctggcgggagcggaggctccgggggaggcggcgttgccgacctgattaagaagtttgagagcatctctaaagaagagggggatcctcccgtggctacctgatgatgaggactagtccctgttcccagagcccacttttttttctttttttgaaataaaatagcctgtctttcagatctcaaaggctcttttcagagccaccaaaaaaaaaaaaaaaaaaaaaaaaaaaaaaaaaaaaaaaaaaaaaaaaaaaaaaaaaaaaaaaaaaaaaaaaaaaaaaaaaaaaaaaaaaaaaaaaaaaaagaatt

SEQ ID NO: 1322 - RNA, 862 nt, synthetic construct
  misc_feature 1..862: note = Artificial____CBFbeta(1-165)_HIF1alpha(549-575) mRNA opt5
  source 1..862: mol_type = other RNA
aggagagtcccgcagtcggcgtccagcggctctgcttgttcgtgtgtgtgtcgttgcaggccttattcaagcttaccatgcccagagtggtccctgaccagcggagcaagttcgagaacgaagagtttttccgcaaactgtccagagaatgcgagatcaagtacaccggctttcgggatcgcccgcacgaagagagacaagcccggttccagaatgcttgtcgcgacgggagatctgagattgcctttgttgcgacaggaacgaacctcagcctgcagttctttcccgcttcctggcagggcgaacaacggcagaccccttctcgcgagtatgtggatcttgaaagagaggccgggaaagtgtacctgaaggcccccatgatcctcaatggagtctgcgtgatttggaaaggctggatcgacctgcagcggcttgatgggatgggatgtctggagttcgacgaggaacgcgctcagcaagaagatgccctcgctcagcaggcctttgaggaagcgagacggcgcacaagagagttcgaggaccgggatagaagccatcgcgaagagatggaacctttttccacccaggacacagatctggacctggagatgctcgccccctatattcctatggatgacgacttccaactgcggtgatgatgaggactagtccctgttcccagagcccacttttttttctttttttgaaataaaatagcctgtctttcagatctcaaaggctcttttcagagccaccaaaaaaaaaaaaaaaaaaaaaaaaaaaaaaaaaaaaaaaaaaaaaaaaaaaaaaaaaaaaaaaaaaaaaaaaaaaaaaaaaaaaaaaaaaaaaaaaaaaaagaatt

SEQ ID NO: 1323 - RNA, 907 nt, synthetic construct
  misc_feature 1..907: note Artificial____CBFbeta(1-165)_Linker_HIF1alpha(549-575) mRNA opt5
  source 1..907: mol_type = other RNA
aggagagtcccgcagtcggcgtccagcggctctgcttgttcgtgtgtgtgtcgttgcaggccttattcaagcttaccatgcccagagtggtccctgaccagcggagcaagttcgagaacgaagagtttttccgcaaactgtccagagaatgcgagatcaagtacaccggctttcgggatcgcccgcacgaagagagacaagcccggttccagaatgcttgtcgcgacgggagatctgagattgcctttgttgcgacaggaacgaacctcagcctgcagttctttcccgcttcctggcagggcgaacaacggcagaccccttctcgcgagtatgtggatcttgaaagagaggccgggaaagtgtacctgaaggcccccatgatcctcaatggagtctgcgtgatttggaaaggctggatcgacctgcagcggcttgatgggatgggatgtctggagttcgacgaggaacgcgctcagcaagaagatgccctcgctcagcaggcctttgaggaagcgagacggcgcacaagagagttcgaggaccgggatagaagccatcgcgaagagatggaaggcggctccgggggatctggcgggagcggaggctccgggggaggcccttttagcacccaggacacagatctggacctggagatgctcgccccctatattcctatggatgacgacttccaactgcggtgatgatgaggactagtccctgttcccagagcccacttttttttctttttttgaaataaaatagcctgtctttcagatctcaaaggctcttttcagagccaccaaaaaaaaaaaaaaaaaaaaaaaaaaaaaaaaaaaaaaaaaaaaaaaaaaaaaaaaaaaaaaaaaaaaaaaaaaaaaaaaaaaaaaaaaaaaaaaaaaaaagaatt

SEQ ID NO: 1324 - RNA, 2542 nt, synthetic construct
  misc_feature 1..2542: note = Artificial____RUNX1(1-177)_N_RUNX1T1a(31-604) mRNA opt5
  source 1..2542: mol_type = other RNA
aggagagtcccgcagtcggcgtccagcggctctgcttgttcgtgtgtgtgtcgttgcaggccttattcaagcttaccatgagaatccccgtggacgccagcacctcccggcgcttcacacctccgtctacggctctgagccccggcaagatgtccgaggccctccctctgggggcgcccgatgctggagccgcccttgctggcaaactgagatctggggaccggagcatggtcgaagttctcgccgatcaccctggagagctggtgcgcaccgactcccccaactttctttgctctgtgctgcctacacattggagatgtaataagaccctcccgattgctttcaaagtcgtggccctgggcgatgttcccgacgggacactggtgaccgtcatggcgggaaacgatgaaaattacagcgccgagctccggaacgctacagccgctatgaagaatcaggtggcccgctttaacgacctgagattcgttggccggtccggccgcgggaaatcttttacccttacgatcaccgtgttcacaaatcctccccaagtcgcgacctatcacagagccattaagatcacagtggatggacctcgggaaccccgcaacagaaccgagaagcattctacgatgccggactcccctgtggatgtcaaaacacagagccggctgacaccccctaccatgccccctcccccgaccacccagggcgctccccgcacatcttcctttacgcctaccacactcaccaatgggacaagccactctcccaccgccctgaacggagctccttccccgcccaatggcttcagcaacgggccttcctctagctccagcagctcccttgccaatcagcaactgccccctgcctgcggagctagacagctcagcaagctgaaacggtttctgacgacactccagcagttcggcaacgacatttctcccgagatcggcgaaagagttcgcaccctggtgcttgggctggtgaatagcaccctcacaatcgaggaatttcattccaagctgcaagaggcgaccaacttccctcttcggccctttgtcattccgttcctgaaagccaacctccctctgctgcagagagagctcctgcactgtgctcgccttgccaagcagaatcccgcccagtacctggctcaacacgaacagctcctgcttgatgcctctacaacgagccccgtggactccagcgagctgctcctggacgttaacgaaaatggaaagcggagaacccctgatcgcacaaaagagaacggcttcgaccgggaaccgctgcattctgagcacccctccaagagaccttgcaccatcagccccgggcagcgctattctcctaataacggactctcctaccaacccaatggcctgcctcatcccacaccgcctccccctcagcactatcggcttgatgacatggcgattgctcaccattacagagatagctatcgccacccctcccatcgggacctgagagatcggaaccgcccgatggggctccacggaaccagacaggaggaaatgatcgaccatcggctgacggatagagagtgggccgaagagtggaaacacctggaccaccttctcaattgtattatggatatggtggaaaagacccgccggtctctgacagtcctgagacgctgccaggaggccgacagagaggaactcaactactggatccggcgctacagcgacgctgaggatctgaaaaagggcggcgggtcctctagctcccatagcagacaacagtctcctgtgaatcccgaccctgttgcccttgatgctcaccgggaatttctgcatcgccccgcctccggatatgtgcccgaggaaatttggaaaaaggcggaggaggccgtcaacgaagtgaagagacaggctatgaccgagctccagaaagccgtcagcgaagctgagcggaaggcccacgacatgatcacaaccgagcgcgcgaaaatggaaagaacggtggccgaggctaagcggcaagccgctgaagatgccctggccgttatcaatcagcaggaggactcttccgaaagctgttggaactgcggccgcaaagctagcgagacatgtagcgggtgcaataccgcgagatactgtggatccttctgccagcacaaggattgggagaagcatcaccatatttgcggccaaacactgcaggcccagcagcaaggggacacccctgctgtgtcttcttccgtcaccccgaacagcggcgccggatcccccatggatacacctcccgccgctacgcctcggtctaccacacccggcacccctagcacaatcgaaaccacgccgagatgatgatgaggactagtccctgttcccagagcccacttttttttctttttttgaaataaaatagcctgtctttcagatctcaaaggctcttttcagagccaccaaaaaaaaaaaaaaaaaaaaaaaaaaaaaaaaaaaaaaaaaaaaaaaaaaaaaaaaaaaaaaaaaaaaaaaaaaaaaaaaaaaaaaaaaaaaaaaaaaaaagaatt

SEQ ID NO: 1325 - RNA, 1057 nt, synthetic construct
  misc_feature 1..1057: note = Artificial____RUNX1(1-241)_RUNX1T1b(short) mRNA opt5
  source 1..1057: mol_type = other RNA
aggagagtcccgcagtcggcgtccagcggctctgcttgttcgtgtgtgtgtcgttgcaggccttattcaagcttaccatgagaatccccgtggacgccagcacctcccggcgcttcacacctccgtctacggctctgagccccggcaagatgtccgaggccctccctctgggggcgcccgatgctggagccgcccttgctggcaaactgagatctggggaccggagcatggtcgaagttctcgccgatcaccctggagagctggtgcgcaccgactcccccaactttctttgctctgtgctgcctacacattggagatgtaataagaccctcccgattgctttcaaagtcgtggccctgggcgatgttcccgacgggacactggtgaccgtcatggcgggaaacgatgaaaattacagcgccgagctccggaacgctacagccgctatgaagaatcaggtggcccgctttaacgacctgagattcgttggccggtccggccgcgggaaatcttttacccttacgatcaccgtgttcacaaatcctccccaagtcgcgacctatcacagagccattaagatcacagtggatggacctcgggaaccccgcagacatcggcagaagctggacgatcagaccaaaccgggcagcctctcctttagcgagcgcctgtctgagcttgaacagctgagacggacggctatgagagtgtcccctcaccatcccgcccctacacccaacccccgcgctagcctcaatcactctaccgccttcaaccctcaaccgcagtcccagatgcaggaggtcgggttttgccacgttgcccaagtgggactgaagctgctcggctgatgatgaggactagtccctgttcccagagcccacttttttttctttttttgaaataaaatagcctgtctttcagatctcaaaggctcttttcagagccaccaaaaaaaaaaaaaaaaaaaaaaaaaaaaaaaaaaaaaaaaaaaaaaaaaaaaaaaaaaaaaaaaaaaaaaaaaaaaaaaaaaaaaaaaaaaaaaaaaaaaagaatt

SEQ ID NO: 1326 - RNA, 2761 nt, synthetic construct
  misc_feature 1..2761: note = Artificial____RUNX1(1-241)_V_RUNX1T1b(22-604) mRNA opt5
  source 1..2761: mol_type = other RNA
aggagagtcccgcagtcggcgtccagcggctctgcttgttcgtgtgtgtgtcgttgcaggccttattcaagcttaccatgagaatccccgtggacgccagcacctcccggcgcttcacacctccgtctacggctctgagccccggcaagatgtccgaggccctccctctgggggcgcccgatgctggagccgcccttgctggcaaactgagatctggggaccggagcatggtcgaagttctcgccgatcaccctggagagctggtgcgcaccgactcccccaactttctttgctctgtgctgcctacacattggagatgtaataagaccctcccgattgctttcaaagtcgtggccctgggcgatgttcccgacgggacactggtgaccgtcatggcgggaaacgatgaaaattacagcgccgagctccggaacgctacagccgctatgaagaatcaggtggcccgctttaacgacctgagattcgttggccggtccggccgcgggaaatcttttacccttacgatcaccgtgttcacaaatcctccccaagtcgcgacctatcacagagccattaagatcacagtggatggacctcgggaaccccgcagacatcggcagaagctggacgatcagaccaaaccgggcagcctctcctttagcgagcgcctgtctgagcttgaacagctgagacggacggctatgagagtgtcccctcaccatcccgcccctacacccaacccccgcgctagcctcaatcactctaccgccttcaaccctcaaccgcagtcccagatgcaggtcgggcccgagaagcgggttcctgccatgcccggaagccctgtggaagtgaaaattcaatccagatctagccctccgacaatgcctcccctgcctcccatcaatcctggcgggccccgcccggtctcctttacccctaccgctctgagcaacggaatcaatcactctcctcccacactcaacggcgcgccctccccgccccagcggttcagcaatggccctgcctctagcacgtcctctgctctgaccaaccagcagcttcccgccacatgcggggccagacaactgagcaagctcaaacgctttctgaccacacttcagcagttcggaaacgacatttcccctgagatcggcgagaaggtgcggaccctggttctcgctctggtgaatagcacggtcacaattgaagagtttcattgtaagctgcaagaagccaccaacttccccctcagacctttcgtgatcccctttctgaaagcgaatcttccgctgctccagcgcgagctgcttcactgcgctcgggccgccaagcagaccccttctcagtacctggctcaacatgaacacctcctgctgaacacatccattgccagccccgctgattcttccgagctcctgatggaggttcacgggaatggaaaaagacctagccccgaacgccgggaggaaaactccttcgacagagacaccatcgccccggagcctcccgcgaagcgggtgtgtacaatttctcctgctccccgccatagccccgcccttacggtccctctgatgaatccgggcgggcagtttcaccccacccctccccctctccagcattatacactggaagatatcgccacctcccacctgtacagagagcccaacaaaatgcttgagcatcgggaagtgagagaccgccaccactctctcggactgaatggcggctatcaggatgagctggtcgaccatcggctcacagaaagagagtgggctgatgaatggaagcacctggaccatgcccttaactgcatcatggagatggtggagaaaacccgcagaagcatggcggttctgcggcgctgtcaagaatccgatagagaggaactcaattactggaagcggcgctataacgagaatacggagctgagaaagaccgggacagaactggtgagccggcagcactctcctggatccgccgacagcctttctaacgattcccagcgcgagttcaatagcagaccgggcaccgggtacgtccccgtggaattttggaaaaagacagaggaagctgttaacaaagtgaagattcaggccatgtctgaggtccaaaaagctgtggccgaggccgaacagaaggctttcgaggtgatcgcgaccgaacgggcccgcatggagcagacgattgctgacgttaagagacaggccgccgaagatgcttttctcgtcatcaacgagcaagaggaaagcacagagaattgctggaactgtggacggaaagcctccgaaacctgcagcggctgtaatattgcgagatactgcgggtctttctgccagcacaaggactgggagcgccatcaccggctgtgtggccagaacctgcatggacaatcccctcacggccaggggagacccctcctgcctgtgggacgcggcagctccgctcggtctgccgactgcagcgtgccctccccggcccttgataaaacatctgctaccaccagcagatcctctacacccgccagcgtcacggcgatcgacaccaatgggctgtgatgatgaggactagtccctgttcccagagcccacttttttttctttttttgaaataaaatagcctgtctttcagatctcaaaggctcttttcagagccaccaaaaaaaaaaaaaaaaaaaaaaaaaaaaaaaaaaaaaaaaaaaaaaaaaaaaaaaaaaaaaaaaaaaaaaaaaaaaaaaaaaaaaaaaaaaaaaaaaaaaagaatt

SEQ ID NO: 1327 - RNA, 2761 nt, synthetic construct
  misc_feature 1..2761: note = Artificial____RUNX1(1-241)_I_RUNX1T1b(22-604) mRNA opt5
  source 1..2761: mol_type = other RNA
aggagagtcccgcagtcggcgtccagcggctctgcttgttcgtgtgtgtgtcgttgcaggccttattcaagcttaccatgagaatccccgtggacgccagcacctcccggcgcttcacacctccgtctacggctctgagccccggcaagatgtccgaggccctccctctgggggcgcccgatgctggagccgcccttgctggcaaactgagatctggggaccggagcatggtcgaagttctcgccgatcaccctggagagctggtgcgcaccgactcccccaactttctttgctctgtgctgcctacacattggagatgtaataagaccctcccgattgctttcaaagtcgtggccctgggcgatgttcccgacgggacactggtgaccgtcatggcgggaaacgatgaaaattacagcgccgagctccggaacgctacagccgctatgaagaatcaggtggcccgctttaacgacctgagattcgttggccggtccggccgcgggaaatcttttacccttacgatcaccgtgttcacaaatcctccccaagtcgcgacctatcacagagccattaagatcacagtggatggacctcgggaaccccgcagacatcggcagaagctggacgatcagaccaaaccgggcagcctctcctttagcgagcgcctgtctgagcttgaacagctgagacggacggctatgagagtgtcccctcaccatcccgcccctacacccaacccccgcgctagcctcaatcactctaccgccttcaaccctcaaccgcagtcccagatgcagattgggcccgagaagcgggtccctgccatgcccggaagccctgttgaagtgaaaatccaatccagatctagccctccgacaatgcctcccctgcctcccatcaatcctggcgggccccgcccggtgtcctttacccctaccgctctgagcaacggaattaatcactctcctcccacactcaacggcgcgccctccccgccccagcggttcagcaatggccctgcctctagcacgtcctctgctctgaccaaccagcagcttcccgccacatgcggggccagacaactgagcaagctcaaacgctttctgaccacacttcagcagttcggaaacgacatctcccctgagattggcgagaaggtccggaccctggtgctcgctctggttaatagcacggtgacaatcgaagagtttcattgtaagctgcaagaagccaccaacttccccctcagacctttcgtcattccctttctgaaagcgaatcttccgctgctccagcgcgagctgcttcactgcgctcgggccgccaagcagaccccttctcagtacctggctcaacatgaacacctcctgctgaacacatccatcgccagccccgctgattcttccgagctcctgatggaggtgcacgggaatggaaaaagacctagccccgaacgccgggaggaaaactccttcgacagagacaccattgccccggagcctcccgcgaagcgggtttgtacaatctctcctgctccccgccatagccccgcccttacggtgcctctgatgaatccgggcgggcagtttcaccccacccctccccctctccagcattatacactggaagatatcgccacctcccacctgtacagagagcccaacaaaatgcttgagcatcgggaagtcagagaccgccaccactctctcggactgaatggcggctatcaggatgagctggtggaccatcggctcacagaaagagagtgggctgatgaatggaagcacctggaccatgcccttaactgcattatggagatggtcgagaaaacccgcagaagcatggcggtgctgcggcgctgtcaagaatccgatagagaggaactcaattactggaagcggcgctataacgagaatacggagctgagaaagaccgggacagaactggttagccggcagcactctcctggatccgccgacagcctttctaacgattcccagcgcgagttcaatagcagaccgggcaccgggtacgtgcccgtcgaattttggaaaaagacagaggaagctgtgaacaaagttaagatccaggccatgtctgaggtgcaaaaagctgtcgccgaggccgaacagaaggctttcgaggtgattgcgaccgaacgggcccgcatggagcagacgatcgctgacgtgaagagacaggccgccgaagatgcttttctcgttattaacgagcaagaggaaagcacagagaattgctggaactgtggacggaaagcctccgaaacctgcagcggctgtaatatcgcgagatactgcgggtctttctgccagcacaaggactgggagcgccatcaccggctgtgtggccagaacctgcatggacaatcccctcacggccaggggagacccctcctgcctgtcggacgcggcagctccgctcggtctgccgactgcagcgtgccctccccggcccttgataaaacatctgctaccaccagcagatcctctacacccgccagcgtgacggcgatcgacaccaatgggctgtgatgatgaggactagtccctgttcccagagcccacttttttttctttttttgaaataaaatagcctgtctttcagatctcaaaggctcttttcagagccaccaaaaaaaaaaaaaaaaaaaaaaaaaaaaaaaaaaaaaaaaaaaaaaaaaaaaaaaaaaaaaaaaaaaaaaaaaaaaaaaaaaaaaaaaaaaaaaaaaaaaagaatt

SEQ ID NO: 1328 - RNA, 1645 nt, synthetic construct
  misc_feature 1..1645: note = Homo sapiens__Q01196-1__RUNX1(K83E_R174Q) mRNA opt11
  source 1..1645: mol_type = other RNA
aggagagtcccgcagtcggcgtccagcggctctgcttgttcgtgtgtgtgtcgttgcaggccttattcaagcttaccatgcgcatcccagtagacgcctcaacctcacgtcgcttcacccctccctcaacagccctctcacccggcaaaatgtccgaagcattacccctcggtgcccccgacgcaggcgcagcactcgccggcaaacttcgatctggcgaccgatccatggtcgaagtcctagccgaccaccccggcgaactcgtacgaacagactcacccaatttcctctgctccgtcctccccactcactggcgctgcaacgaaaccctgcccattgccttcaaagtcgtcgcacttggcgacgtcccagacggcaccctagtaacagtaatggccggaaacgacgaaaactactcagcagaactacgcaacgccaccgccgccatgaaaaaccaagtagcccgcttcaacgatctacgattcgtcggccgatccggacgtggcaaatccttcactcttacaatcacagtcttcacaaatcccccacaagtcgccacctaccaccgcgccatcaaaattaccgttgacggcccccaagaaccaagacgccatcgtcaaaaacttgacgaccaaaccaaacccggctcactatcattctccgaacgcctctccgaactcgaacaactccgccgcaccgccatgcgcgtctcaccccaccaccccgctcccacaccaaaccccagggcctcccttaaccactccaccgcattcaacccccaaccacaatcccaaatgcaagacacacgacaaatacaaccatccccaccgtggtcatacgaccaatcttaccaatacctcggttctatagcctccccatccgtccacccagccacacccatctcccccggccgcgcatccggaatgaccacactctcagccgaactctcctcccgcctatcaaccgcccctgacctcaccgccttttccgacccccgacaattccccgcactaccgtcaatctccgacccccgaatgcactatcccggcgccttcacctactcccccacacctgtaacctccggcatcggcatcggcatgtccgccatgggaagcgccaccagatatcatacttacctacccccaccttatccaggatcctcacaagcccaaggcggcccttttcaagcctcctccccctcctaccatctctactacggcgcctccgccggctcctaccaattctccatggtcggcggcgaacgatcaccaccccgaatcctccctccctgcaccaacgcatcgaccggatcggccctcttaaacccctccctccccaaccaatcagacgtcgtcgaagccgaaggatctcactccaactcccccacaaacatggcaccttcagcccgcctcgaagaagccgtctggcgcccctactaatgatgaggactagtccctgttcccagagcccacttttttttctttttttgaaataaaatagcctgtctttcagatctcaaaggctcttttcagagccaccaaaaaaaaaaaaaaaaaaaaaaaaaaaaaaaaaaaaaaaaaaaaaaaaaaaaaaaaaaaaaaaaaaaaaaaaaaaaaaaaaaaaaaaaaaaaaaaaaaaaagaatt

SEQ ID NO: 1329 - RNA, 2119 nt, synthetic construct
  misc_feature 1..2119: note = Homo sapiens____CBFbeta(1-165)_SMMHC(1527-1972) mRNA opt11
  source 1..2119: mol_type = other RNA
aggagagtcccgcagtcggcgtccagcggctctgcttgttcgtgtgtgtgtcgttgcaggccttattcaagcttaccatgccaagggtggtgcccgaccagagaagcaagttcgaaaatgaggaatttttccggaagctgagcagggaatgcgagataaaatacacgggcttccgagacagaccacacgaagagaggcaagcgaggttccaaaacgcctgcagagacggaagaagcgagatagcgttcgtggccacggggacgaacctgagcctacagttcttccctgcaagctggcaaggagaacagaggcagacaccgagtagggagtacgtggacctggagagggaggcggggaaggtgtacctgaaggcaccaatgatactaaatggagtatgtgtaatctggaagggatggatagacctgcaacggctggacgggatgggatgcctggagttcgacgaggaaagagcgcagcaagaggacgcgctggcacaacaggcgttcgaggaagcaaggaggcggacgcgagagttcgaggacagggataggagccacagagaggagatggaggtacacgagctagagaaaagcaagagggcgctggaaacacaaatggaggagatgaagacacagctggaggagttggaagacgaactgcaagcgacagaggacgcaaagctgaggctggaagtcaacatgcaggcattaaagggacagttcgagagagacctgcaggcaagagacgagcagaacgaggaaaagaggaggcagctccaaaggcagctgcacgagtacgaaacggaactggaggacgagcgaaagcagagggcgctagcagcagcagcaaagaaaaagctggagggggacctgaaggacctggagttgcaggcagacagcgcaataaaagggagggaagaggcgatcaagcaactaagaaagctgcaggcacaaatgaaggatttccagagagagctagaggatgcaagggcaagccgggacgagatattcgcgacggcaaaagaaaacgagaaaaaggcgaaaagcctagaagcagacctgatgcagctacaggaggatttggcggcggcggagagggcaaggaaacaggcagatctggagaaggaggagctggcggaagagttggcaagtagcctaagcggaaggaatgcgctgcaggacgaaaagcggagactcgaggcgagaatagcacagctagaggaggaactggaggaggagcagggaaacatggaagcgatgagcgacagagtgagaaaggcgacgcaacaggcggaacagctaagcaacgagttagcaacggagagaagtacagcccaaaagaatgaaagtgcaaggcaacagctagagaggcagaacaaggaactgaggagcaagctgcacgagatggaaggagcagtgaaaagcaaattcaaaagcaccatcgcggcgctggaagcgaagatagcgcagctggaggagcaggtagaacaagaggcaagagagaagcaagcggcgacaaagagtctaaagcagaaagacaagaaactgaaagagatactgttacaagtggaggacgaaaggaagatggcagagcaatacaaggagcaggcggaaaaggggaacgcgagggtgaaacagttaaagaggcaactggaggaggcggaggaagagagccaaagaataaacgccaacagaaggaaactacagcgggaattggacgaggcaacagagagtaacgaagccatggggcgagaagtgaacgcactaaagagcaaactgaggcgggggaacgagacgagtttcgtaccgagcaggcggagcggagggagaagggtgatagagaatgcagacggcagcgaagaggaaacggacacgagagacgcagacttcaacgggacgaaggcgagcgaatagtgatgaggactagtccctgttcccagagcccacttttttttctttttttgaaataaaatagcctgtctttcagatctcaaaggctcttttcagagccaccaaaaaaaaaaaaaaaaaaaaaaaaaaaaaaaaaaaaaaaaaaaaaaaaaaaaaaaaaaaaaaaaaaaaaaaaaaaaaaaaaaaaaaaaaaaaaaaaaaaaagaatt

SEQ ID NO: 1330 - RNA, 1834 nt, synthetic construct
  misc_feature 1..1834: note = Artificial____CBFbeta(1-165)_SMMHC(1527-1877) mRNA opt11
  source 1..1834: mol_type = other RNA
aggagagtcccgcagtcggcgtccagcggctctgcttgttcgtgtgtgtgtcgttgcaggccttattcaagcttaccatgccgagggtggtgccagaccaaaggagcaagttcgagaacgaggaatttttcagaaagctgagcagagagtgcgagataaagtacacggggtttagagacagaccacacgaggagaggcaggcaaggttccagaacgcatgcagagacgggagaagcgagatagcattcgtagcgacaggaacaaacctaagcctacaatttttcccggcgagctggcagggagagcagagacagacgccaagcagggagtacgtggacctagagagggaagcaggaaaggtgtacctaaaggcaccaatgatactaaatggggtgtgcgtaatatggaaggggtggatagacctacagagactggacgggatgggatgcttggagttcgacgaagagagagcgcaacaggaggacgcactggcacaacaagcattcgaagaggcaaggaggaggacgagagagttcgaggacagagacaggagtcacagggaggaaatggaggtacacgaactagagaaaagcaagagggcgctggagacacagatggaagagatgaaaacgcaactggaggagctggaagacgagctgcaggcaacagaagatgcgaagctaaggctggaggtgaacatgcaggcactgaaaggacagttcgaaagggacctgcaggcgagggacgaacagaacgaggaaaagaggaggcagctccagaggcagctacacgagtacgagacggagttggaagacgagagaaagcaaagagcactagcggcggcggcgaagaaaaagctagagggagacctcaaagatctggagctacaggcagacagcgcgataaagggcagggaggaagcgataaagcagctaaggaagctgcaggcacagatgaaggacttccagagggagctcgaggacgcaagagcgagccgggacgagatattcgccacggcaaaggagaacgaaaagaaggcgaaaagcctggaggcggacctaatgcaactgcaagaagacctggcagcggcagagcgagcgaggaagcaggcagacctagagaaggaggagctggcggaagaactggcgagtagcctgagcggaaggaacgcactgcaggacgagaagaggaggctagaggcaagaatagcgcagctggaggaggagttggaggaggagcaggggaacatggaggcgatgagcgacagagtgagaaaggcgacacagcaagcagagcagttaagcaacgagctggcaacagagagaagcacggcgcaaaagaacgaatcagcgaggcaacagttggagaggcagaacaaggaactaagaagcaagctgcacgagatggagggcgcggtaaagagcaaattcaagtcaacaatagcggcgcttgaggcaaagatagcacagctggaagaacaagtagaacaggaggcgagagagaaacaagcagcgacaaagagcctgaaacagaaggacaagaagttaaaggagatactgctacaggtagaggacgaaagaaaaatggcggaacagtacaaagagcaggcagaaaaggggaacgcataatgatgaggactagtccctgttcccagagcccacttttttttctttttttgaaataaaatagcctgtctttcagatctcaaaggctcttttcagagccaccaaaaaaaaaaaaaaaaaaaaaaaaaaaaaaaaaaaaaaaaaaaaaaaaaaaaaaaaaaaaaaaaaaaaaaaaaaaaaaaaaaaaaaaaaaaaaaaaaaaaagaatt

SEQ ID NO: 1331 - RNA, 895 nt, synthetic construct
  misc_feature 1..895: note = Artificial____CBFbeta(1-165)_Linker_Lifeact mRNA opt11
  source 1..895: mol_type = other RNA
aggagagtcccgcagtcggcgtccagcggctctgcttgttcgtgtgtgtgtcgttgcaggccttattcaagcttaccatgccgcgcgtggtcccggaccagcgctcgaaatttgaaaatgaagagttctttcgcaagctctcgcgagagtgcgagataaagtacacgggctttcgcgatagaccgcacgaggaaaggcaagcgcgctttcaaaatgcctgtagagatggcaggagcgagatcgcgttcgtggccacgggcacgaacttgagcctgcaatttttcccggcctcgtggcagggcgagcagaggcaaacgccctcgcgcgagtacgtggacttggaaagggaagcgggcaaggtgtatctaaaggccccgatgatactaaatggagtgtgcgtgatctggaaagggtggatagacctgcaaaggctcgatggaatgggctgtctagagttcgatgaggaacgcgcgcaacaggaagacgcattggcacagcaagcgttcgaggaagcacgcaggagaacgcgcgagttcgaggacagggacaggagccatcgcgaggaaatggaagggggctcgggagggagcgggggctctggcgggagcgggggaggaggcgtggccgatctcatcaaaaagttcgagagcataagcaaagaagagggcgatcccccggtagcgacatagtgatgaggactagtccctgttcccagagcccacttttttttctttttttgaaataaaatagcctgtctttcagatctcaaaggctcttttcagagccaccaaaaaaaaaaaaaaaaaaaaaaaaaaaaaaaaaaaaaaaaaaaaaaaaaaaaaaaaaaaaaaaaaaaaaaaaaaaaaaaaaaaaaaaaaaaaaaaaaaaaagaatt

SEQ ID NO: 1332 - RNA, 862 nt, synthetic construct
  misc_feature 1..862: note = Artificial____CBFbeta(1-165)_HIF1alpha(549-575) mRNA opt11
  source 1..862: mol_type = other RNA
aggagagtcccgcagtcggcgtccagcggctctgcttgttcgtgtgtgtgtcgttgcaggccttattcaagcttaccatgccgcgcgtggtcccggaccagcgctcgaaatttgaaaatgaagagttctttcgaaagctctcgcgcgagtgcgagatcaaatacacgggcttccgcgatcgcccgcacgaggaaaggcaagcgcgctttcaaaatgcctgtcgcgatggcaggagcgagatcgcgttcgtggccacgggcacgaacctgagcctgcaatttttcccggcctcgtggcagggcgagcaaaggcaaacgccctcgcgcgagtacgtggacttggaaagggaagcgggcaaggtctatctcaaggccccgatgatactcaatggcgtgtgcgtgatctggaaagggtggatagacttgcaaaggctcgatggcatgggctgtctcgagttcgacgaggaacgcgcgcaacaggaagatgccctggcccagcaagcgttcgaggaagcgcgcaggcgcacgcgcgagttcgaggacagagacaggagccaccgagaggaaatggaaccgttctcgacccaggacacggacctggacttggaaatgctcgcgccctatatcccgatggatgacgatttccagctcaggtaatgatgaggactagtccctgttcccagagcccacttttttttctttttttgaaataaaatagcctgtctttcagatctcaaaggctcttttcagagccaccaaaaaaaaaaaaaaaaaaaaaaaaaaaaaaaaaaaaaaaaaaaaaaaaaaaaaaaaaaaaaaaaaaaaaaaaaaaaaaaaaaaaaaaaaaaaaaaaaaaaagaatt

SEQ ID NO: 1333 - RNA, 907 nt, synthetic construct
  misc_feature 1..907: note Artificial____CBFbeta(1-165)_Linker_HIF1alpha(549-575) mRNA opt11
  source 1..907: mol_type = other RNA
aggagagtcccgcagtcggcgtccagcggctctgcttgttcgtgtgtgtgtcgttgcaggccttattcaagcttaccatgccgcgcgtggtcccggaccagcgctcgaaatttgaaaatgaagagttctttcgaaagctatcgcgagagtgcgagatcaagtacacgggattccgcgatcgaccgcacgaggaaagacaagcgcgatttcaaaatgcatgtcgcgatggcaggagcgagatagcgttcgtggccacgggcacaaacttgagcttgcaattcttcccggcatcatggcagggcgagcaaaggcaaacaccctcgcgcgagtacgtggacttggaaagggaagcgggcaaggtctacctaaaggccccgatgatactcaatggagtgtgcgtgatctggaaagggtggatagacttacaaaggctcgatggcatgggatgtctcgagttcgatgaggaacgcgcgcaacaggaagatgccttggcacagcaagcgttcgaggaagcgcgcaggcgaacgcgcgagttcgaagacagagacaggagccatcgagaggaaatggaaggaggatcgggcggaagcgggggctcgggcgggagcgggggcggaccatttagcacgcaagataccgatctagatctcgagatgttggccccgtacatacccatggacgatgactttcaattgcgctagtgatgaggactagtccctgttcccagagcccacttttttttctttttttgaaataaaatagcctgtctttcagatctcaaaggctcttttcagagccaccaaaaaaaaaaaaaaaaaaaaaaaaaaaaaaaaaaaaaaaaaaaaaaaaaaaaaaaaaaaaaaaaaaaaaaaaaaaaaaaaaaaaaaaaaaaaaaaaaaaaagaatt

SEQ ID NO: 1334 - RNA, 2542 nt, synthetic construct
  misc_feature 1..2542: note = Artificial____RUNX1(1-177)_N_RUNX1T1a(31-604) mRNA opt11
  source 1..2542: mol_type = other RNA
aggagagtcccgcagtcggcgtccagcggctctgcttgttcgtgtgtgtgtcgttgcaggccttattcaagcttaccatgcgcataccagtagatgcctccacctctcgccgcttcacacctccctcgacagccctcagccccggaaaaatgtccgaagcgctcccacttggcgcacccgacgcaggcgctgccctcgccggaaaactccgtagtggtgaccgctctatggtggaagtcttagccgaccaccccggagaactcgtaagaacagactccccaaacttcctctgctccgtgctacctacacactggcgctgcaacaaaaccctcccgattgccttcaaagtcgtagccctaggcgacgtccccgacggaaccctcgtcaccgtcatggcaggcaatgatgaaaactactccgcagaactccgcaacgccaccgctgcaatgaaaaaccaagtcgcacgattcaatgacctcagattcgtagggcgctccggccgagggaaatcattcaccctcacaatcacagtcttcaccaaccctccacaagtcgcaacataccaccgcgccatcaaaatcacagtcgacggaccccgagaaccccgcaatagaactgagaaacacagcaccatgcccgattcgccagtcgatgtcaaaacccaatcaaggctcaccccgcccacaatgcccccacccccaaccacacagggcgcaccccgcacctcttcattcacccctacaacactaacaaatggcacatcccacagtccaaccgcccttaatggcgccccatccccaccaaacggtttctccaacggcccctcctcttcatcatcatcctccctggctaaccaacaactcccacccgcatgcggagcacgacaactcagcaaactaaaacgattcctcaccactcttcaacaattcggcaacgacatatccccagaaataggcgaacgagtccgaaccctagtcctcggtctagtcaattccacgctcactatagaggagttccactccaaactacaagaagctaccaacttcccactccgaccattcgtcattccattcctcaaggcaaacctccctctgctccaacgtgaactcctacactgcgccagactcgccaagcaaaaccccgcacaatatcttgcccaacacgaacaacttctcttagacgcctccaccacatctcccgtcgactcatctgaacttctcctagatgttaacgaaaacggcaaacgcagaactcccgaccgcaccaaagaaaacgggttcgatagagaaccactacacagcgaacacccctctaaacgcccatgcaccatatctcctggccaacggtactcacctaacaacggtctctcataccaacccaatggcctcccacaccccaccccaccacccccacaacactaccgacttgacgacatggcgatcgcacaccactacagagactcttataggcacccatcccaccgcgatctccgcgaccgcaatcgccccatgggactacacggcactcgccaagaagaaatgatcgaccaccgactaaccgaccgtgaatgggcagaagaatggaaacacctcgaccacctcctaaattgcatcatggacatggtcgagaaaacaaggcgctcactcacggttctccgtcgctgccaagaagcagatcgtgaagaactgaactattggattcgacgatactcagacgccgaagacctcaagaaaggcggaggctcatctagctcccatagtcgccaacaatcacccgtaaacccggacccagtagccctcgacgctcaccgagagttcctacaccgtcccgcctccggatacgtacccgaagaaatatggaagaaagctgaagaagcagtaaacgaagtcaaacgccaagctatgaccgaactacaaaaagccgtaagcgaagctgaacgcaaagcacacgacatgatcactaccgaacgcgcaaaaatggaacgaaccgtcgcagaagccaaacgccaggccgccgaagacgcccttgctgtcataaatcagcaagaagactcctccgaatcctgctggaactgtggccgcaaagccagcgaaacctgctccggttgcaataccgcccgctactgcggttcattctgccagcacaaagactgggaaaaacaccaccacatctgcggtcaaaccctgcaagctcaacaacaaggcgacacccctgccgtctcatccagcgtaacccccaacagcggcgccggctccccaatggacaccccacccgcagccacaccccgatcaacaacacccggaacaccctcgactatcgaaaccacaccccgttagtgatgaggactagtccctgttcccagagcccacttttttttctttttttgaaataaaatagcctgtctttcagatctcaaaggctcttttcagagccaccaaaaaaaaaaaaaaaaaaaaaaaaaaaaaaaaaaaaaaaaaaaaaaaaaaaaaaaaaaaaaaaaaaaaaaaaaaaaaaaaaaaaaaaaaaaaaaaaaaaaagaatt

SEQ ID NO: 1335 - RNA, 1057 nt, synthetic construct
  misc_feature 1..1057: note = Artificial____RUNX1(1-241)_RUNX1T1b(short) mRNA opt11
  source 1..1057: mol_type = other RNA
aggagagtcccgcagtcggcgtccagcggctctgcttgttcgtgtgtgtgtcgttgcaggccttattcaagcttaccatgcgcatcccagtcgacgcctccacctcccgccgcttcaccccaccctcaacagcactctcacccggcaaaatgtcagaagcactccctctcggagcacccgacgccggcgccgccctcgccggcaaactccgctcaggcgaccgatcaatggtcgaagtcctagccgaccaccccggagaactcgtccgcaccgactcacccaacttcctctgctccgtcctacccacccactggcgctgcaacaaaaccctccccatcgccttcaaagtcgtcgcactaggcgacgtcccagacggcaccctcgtcaccgtcatggccggcaacgacgaaaactactccgccgaactccgcaacgccacagcagccatgaaaaaccaagtcgcccgcttcaacgacctccgcttcgtaggccgctccggccgcggcaaatccttcaccctaaccatcacagtattcaccaatccaccccaagtcgccacctaccaccgcgctatcaaaatcaccgtcgacggcccccgcgaaccccgccgccaccgacaaaaactcgacgaccaaaccaaacccggctcactctccttctccgaacgcctctccgaactcgaacaactccgccgaacagccatgcgcgtctcaccccaccaccccgcccccacccccaacccccgagcctccctcaaccactcaaccgccttcaacccccaaccacaatcccaaatgcaagaagtcggcttctgccacgtagcccaagtcggtctcaaactcctcggctaatgatgaggactagtccctgttcccagagcccacttttttttctttttttgaaataaaatagcctgtctttcagatctcaaaggctcttttcagagccaccaaaaaaaaaaaaaaaaaaaaaaaaaaaaaaaaaaaaaaaaaaaaaaaaaaaaaaaaaaaaaaaaaaaaaaaaaaaaaaaaaaaaaaaaaaaaaaaaaaaaagaatt

SEQ ID NO: 1336 - RNA, 2761 nt, synthetic construct
  misc_feature 1..2761: note = Artificial____RUNX1(1-241)_V_RUNX1T1b(22-604) mRNA opt11
  source 1..2761: mol_type = other RNA
aggagagtcccgcagtcggcgtccagcggctctgcttgttcgtgtgtgtgtcgttgcaggccttattcaagcttaccatgcgcatccccgtggacgcctcaacaagccgacgcttcacgcccccatccaccgccctatcccccggcaaaatgtcagaagccctccccctcggagccccagacgcaggggccgcactcgcaggcaaacttcgatccggggacaggagcatggtcgaagtcctagccgaccaccccggagagctagtccgaaccgactcccccaacttcctgtgctccgtactgccaacccactggcgatgtaacaaaacactccctatagcttttaaagtagtggccctaggagacgttccagacggcaccctcgtcaccgtcatggccggcaacgacgaaaactacagcgccgaactacgcaacgcaactgccgccatgaaaaatcaagtggccagattcaacgacctccgcttcgtcggccgcagcggaagaggaaaatcgttcaccttaaccatcacagttttcacaaacccaccccaggttgcaacatatcaccgagccatcaaaatcactgttgacggcccacgtgaaccaagacggcatcgtcaaaaactagacgaccaaacaaaaccaggttcactctcattttcagaacgcctctcagaactcgaacaactacgacgaaccgctatgcgcgtctcaccccaccaccccgccccgaccccgaacccacgagcatctctgaaccacagcacagccttcaacccacaaccacagtcccaaatgcaagttggacccgagaaacgagtcccagctatgccgggcagccccgtcgaggtcaaaatccaatcgcgcagcagccctcccacaatgcccccactaccacccatcaacccaggcggtccccgccccgtctcattcaccccaacagccctctcaaatggaatcaaccacagccctcccaccctcaacggtgccccctccccaccacaacgcttttcaaacggaccagcgtcctccacctccagcgctctcactaaccaacaactcccagcaacttgcggagccagacaactcagcaaactaaaaagattcctcaccaccctacaacagttcggaaacgacatctcccccgaaataggcgagaaagttcgcactcttgtactagcccttgtaaactccacagtaactatcgaagagttccactgcaaactacaagaagcaaccaacttcccactccgccccttcgtgatcccattcctaaaagcaaacctaccactactccaacgcgaactgctccactgcgcccgtgccgcaaaacagactccctcacaatacctcgcccaacatgaacatcttctcctcaacacatcaattgctagcccagcagactcatccgaacttctcatggaagtccacggaaacggtaaacgaccatctcccgaacgacgcgaagaaaactccttcgaccgcgacaccatcgcccccgaaccacccgccaaacgcgtatgcacaatatcaccggccccgcgccactcccctgcacttaccgtaccccttatgaacccagggggccaattccaccctacacccccacccctgcagcactacactctagaagacattgcaacaagccacctataccgagaacctaacaaaatgctagaacacagagaagtgcgtgaccgccaccacagcctcggcttaaacgggggctaccaagacgaactcgttgatcaccgcctcaccgaacgagagtgggcagatgaatggaaacacctggaccacgccctaaactgcatcatggaaatggtcgagaaaaccagacgatcaatggccgtcctaagaaggtgccaagaatcagacagagaagaactcaactattggaaacgacgatataacgaaaacaccgaactcagaaaaacaggcactgaactcgtctcgagacaacactcaccaggctctgcagactctctttccaacgactcacaacgcgagttcaatagccgaccaggcaccggctacgtccccgtcgaattttggaagaaaaccgaagaagccgtaaacaaagtcaaaatacaagcaatgtccgaagtccaaaaagccgtcgccgaagcagaacaaaaagccttcgaggttatcgcgaccgaacgcgcccgtatggaacagacaatagccgacgtcaaacgacaggctgccgaagacgctttcctcgttatcaacgaacaagaagaatcaactgaaaactgctggaactgcggccggaaagcgtccgaaacctgctcaggctgcaacatcgctcgttattgcggctccttttgccaacataaagactgggagcgccaccaccgcctatgcggccaaaacctacacggccaaagcccccacggacaaggccgacctctcctacccgtaggccgaggctcctccgcacgctccgccgactgcagcgtccccagccccgcactcgacaaaacttcggcaaccacatcccgcagcagcacccccgcgagcgttacagccatcgacacaaacggactataatgatgaggactagtccctgttcccagagcccacttttttttctttttttgaaataaaatagcctgtctttcagatctcaaaggctcttttcagagccaccaaaaaaaaaaaaaaaaaaaaaaaaaaaaaaaaaaaaaaaaaaaaaaaaaaaaaaaaaaaaaaaaaaaaaaaaaaaaaaaaaaaaaaaaaaaaaaaaaaaaagaatt

SEQ ID NO: 1337 - RNA, 2761 nt, synthetic construct
  misc_feature 1..2761: note = Artificial____RUNX1(1-241)_I_RUNX1T1b(22-604) mRNA opt11
  source 1..2761: mol_type = other RNA
aggagagtcccgcagtcggcgtccagcggctctgcttgttcgtgtgtgtgtcgttgcaggccttattcaagcttaccatgaggatacccgtcgacgcctccacgtcacgccgcttcacacccccaagcaccgccctatcacccggcaaaatgtccgaagctctaccactaggtgcgccagacgcaggcgctgctctcgccggaaaactacgatccggggaccgatccatggtcgaagtcctcgctgatcaccccggcgaacttgtccgcacagactccccaaacttcctctgctccgtactcccgactcactggcgttgcaacaaaacacttcctattgcgttcaaggtcgtagccctaggggacgtccccgacggcaccttagtcacagtcatggcgggtaacgacgagaactactcagccgaattacgcaacgctacagcagccatgaaaaaccaggtagctcgcttcaacgacctccggttcgtcggtagaagcggccgaggaaaatcttttaccctcacaatcaccgtgttcaccaacccaccccaagtcgccacctaccaccgggcaatcaaaatcacagttgacggaccccgcgagccccgacgccatcgccaaaaacttgacgaccaaaccaaaccaggatcactatccttctcagagcgactctcagaactcgaacaattacgccggaccgcaatgcgtgtctcaccccaccacccggcccccacgcccaacccccgcgcctcactcaaccactccactgctttcaacccgcaaccccaatcccaaatgcagatcggcccagaaaaacgcgttcccgccatgccaggaagtcccgtcgaagtcaaaatccaatccagatcttccccaccaaccatgcctcccctcccgcccataaacccgggaggtccccgacccgtgtccttcacccccaccgccctctcgaacggcatcaaccactcaccacctaccctaaacggagcaccatccccaccccaacgcttctcaaacggacctgcatcctccacatcgtccgccctcaccaaccaacaactcccagccacatgcggcgcccgtcaactatctaagctaaaacgcttcctaaccactctccagcaatttggcaacgacatatcccccgaaatcggcgaaaaagtccgcacactcgtcttagccctcgtcaattccaccgtcaccatagaagagttccactgcaaactccaagaagccacaaacttcccactccgtccctttgtcatcccattcttaaaggcgaacctaccactactccaaagagaactactccactgcgctcgggccgcaaaacaaacccctagccagtacctagcccaacacgaacatctactactcaacactagcatcgcctcacccgcagactcatctgaactacttatggaagtccacggcaacggcaaacgcccctccccagaaaggcgcgaagaaaactccttcgatcgagacacaatagcacccgaaccacccgccaaacgcgtatgcaccatcagcccagcaccccgacactccccagccctcacggtccctctaatgaacccgggcggacaattccaccccaccccaccacccctacaacactacacattagaagacatagccacatctcacctctaccgcgaacccaataaaatgctggaacaccgcgaagtccgagatagacaccattctctaggactaaatggaggctaccaagacgaacttgtcgaccacagactcacagaacgcgaatgggccgacgaatggaagcacctcgatcatgcccttaactgtatcatggagatggtagagaaaacaagacgatccatggcagttctacgtcgatgccaagagagcgaccgcgaagaactcaactactggaaacgccgctacaacgaaaacacagaactacgaaaaaccggcaccgaactcgtctcccgtcagcactccccgggaagcgccgactcccttagcaacgactcacaacgcgagttcaactctcgccccggaacaggctacgttcctgtcgagttctggaagaaaactgaagaagccgtaaacaaagtcaaaatccaagccatgtcagaagtccaaaaagccgtagcagaagccgaacaaaaggctttcgaagtaattgcaaccgaacgcgcacgtatggaacaaaccatagcagatgtaaaaagacaagccgccgaagacgccttcctcgtcataaacgaacaagaagaatccaccgaaaactgttggaactgcggccgtaaagcctccgaaacatgttctggctgcaacattgcccgttactgtgggtccttctgccaacacaaagattgggaacgccaccaccgcctctgcggacaaaacctccacggccaaagcccccatggtcaaggtagaccactactacccgttggacgcggctccagcgcacgatcagccgactgctcagtgccatcccccgcccttgacaaaacctccgccacaacctcgcgatcatccacaccagcctcagtaacagccatagacaccaacgggctttgatgatgaggactagtccctgttcccagagcccacttttttttctttttttgaaataaaatagcctgtctttcagatctcaaaggctcttttcagagccaccaaaaaaaaaaaaaaaaaaaaaaaaaaaaaaaaaaaaaaaaaaaaaaaaaaaaaaaaaaaaaaaaaaaaaaaaaaaaaaaaaaaaaaaaaaaaaaaaaaaaagaatt

SEQ ID NO: 1338 - RNA, 1615 nt, synthetic construct
  misc_feature 1..1615: note = Homo sapiens__Q01196-1__RUNX1(K83E_R174Q) mRNA wt
  source 1..1615: mol_type = other RNA
aggagagtcccgcagtcggcgtccagcggctctgcttgttcgtgtgtgtgtcgttgcaggccttattcaagcttaccatgcgtatccccgtagatgccagcacgagccgccgcttcacgccgccttccaccgcgctgagcccaggcaagatgagcgaggcgttgccgctgggcgccccggacgccggcgctgccctggccggcaagctgaggagcggcgaccgcagcatggtggaggtgctggccgaccacccgggcgagctggtgcgcaccgacagccccaacttcctctgctccgtgctgcctacgcactggcgctgcaacgagaccctgcccatcgctttcaaggtggtggccctaggggatgttccagatggcactctggtcactgtgatggctggcaatgatgaaaactactcggctgagctgagaaatgctaccgcagccatgaagaaccaggttgcaagatttaatgacctcaggtttgtcggtcgaagtggaagagggaaaagcttcactctgaccatcactgtcttcacaaacccaccgcaagtcgccacctaccacagagccatcaaaatcacagtggatgggccccaggaacctcgaagacatcggcagaaactagatgatcagaccaagcccgggagcttgtccttttccgagcggctcagtgaactggagcagctgcggcgcacagccatgagggtcagcccacaccacccagcccccacgcccaaccctcgtgcctccctgaaccactccactgcctttaaccctcagcctcagagtcagatgcaggatacaaggcagatccaaccatccccaccgtggtcctacgatcagtcctaccaatacctgggatccattgcctctccttctgtgcacccagcaacgcccatttcacctggacgtgccagcggcatgacaaccctctctgcagaactttccagtcgactctcaacggcacccgacctgacagcgttcagcgacccgcgccagttccccgcgctgccctccatctccgacccccgcatgcactatccaggcgccttcacctactccccgacgccggtcacctcgggcatcggcatcggcatgtcggccatgggctcggccacgcgctaccacacctacctgccgccgccctaccccggctcgtcgcaagcgcagggaggcccgttccaagccagctcgccctcctaccacctgtactacggcgcctcggccggctcctaccagttctccatggtgggcggcgagcgctcgccgccgcgcatcctgccgccctgcaccaacgcctccaccggctccgcgctgctcaaccccagcctcccgaaccagagcgacgtggtggaggccgagggcagccacagcaactcccccaccaacatggcgccctccgcgcgcctggaggaggccgtgtggaggccctactgaggactagtccctgttcccagagcccacttttttttctttttttgaaataaaatagcctgtctttcagatctaaaaaaaaaaaaaaaaaaaaaaaaaaaaaaaaaaaaaaaaaaaaaaaaaaaaaaaaaaaaaaaaaaaaaaaaaaaaaaaaaaaaaaaaaaaaaaaaaaaagaatt

SEQ ID NO: 1339 - RNA, 2089 nt, synthetic construct
  misc_feature 1..2089: note = Homo sapiens____CBFbeta(1-165)_SMMHC(1527-1972) mRNA wt
  source 1..2089: mol_type = other RNA
aggagagtcccgcagtcggcgtccagcggctctgcttgttcgtgtgtgtgtcgttgcaggccttattcaagcttaccatgccgcgcgtcgtgcccgaccagagaagcaagttcgagaacgaggagttttttaggaagctgagccgcgagtgtgagattaagtacacgggcttcagggaccggccccacgaggaacgccaggcacgcttccagaacgcctgccgcgacggccgctcggaaatcgcttttgtggccacaggaaccaatctgtctctccagttttttccggccagctggcagggagaacagcgacaaacacctagccgagagtatgtcgacttagaaagagaagcaggcaaggtatatttgaaggctcccatgattctgaatggagtctgtgttatctggaaaggctggattgatctccaaagactggatggtatgggctgtctggagtttgatgaggagcgagcccagcaggaggatgcattagcacaacaggcctttgaagaggctcggagaaggacacgcgaatttgaagatagagacaggtctcatcgggaggaaatggaggtccatgagctggagaagtccaagcgggccctggagacccagatggaggagatgaagacgcagctggaagagctggaggacgagctgcaagccacggaggacgccaaactgcggctggaagtcaacatgcaggcgctcaagggccagttcgaaagggatctccaagcccgggacgagcagaatgaggagaagaggaggcaactgcagagacagcttcacgagtatgagacggaactggaagacgagcgaaagcaacgtgccctggcagctgcagcaaagaagaagctggaaggggacctgaaagacctggagcttcaggccgactctgccatcaaggggagggaggaagccatcaagcagctacgcaaactgcaggctcagatgaaggactttcaaagagagctggaagatgcccgtgcctccagagatgagatctttgccacagccaaagagaatgagaagaaagccaagagcttggaagcagacctcatgcagctacaagaggacctcgccgccgctgagagggctcgcaaacaagcggacctcgagaaggaggaactggcagaggagctggccagtagcctgtcgggaaggaacgcactccaggacgagaagcgccgcctggaggcccggatcgcccagctggaggaggagctggaggaggagcagggcaacatggaggccatgagcgaccgggtccgcaaagccacacagcaggccgagcagctcagcaacgagctggccacagagcgcagcacggcccagaagaatgagagtgcccggcagcagctcgagcggcagaacaaggagctccggagcaagctccacgagatggagggggccgtcaagtccaagttcaagtccaccatcgcggcgctggaggccaagattgcacagctggaggagcaggtcgagcaggaggccagagagaaacaggcggccaccaagtcgctgaagcagaaagacaagaagctgaaggaaatcttgctgcaggtggaggacgagcgcaagatggccgagcagtacaaggagcaggcagagaaaggcaatgccagggtcaagcagctcaagaggcagctggaggaggcagaggaggagtcccagcgcatcaacgccaaccgcaggaagctgcagcgggagctggatgaggccacggagagcaacgaggccatgggccgcgaggtgaacgcactcaagagcaagctcaggcgaggaaacgagacctctttcgttccttctagaaggtctggaggacgtagagttattgaaaatgcagatggttctgaggaggaaacggacactcgagacgcagacttcaatggaaccaaggccagtgaatgaggactagtccctgttcccagagcccacttttttttctttttttgaaataaaatagcctgtctttcagatctaaaaaaaaaaaaaaaaaaaaaaaaaaaaaaaaaaaaaaaaaaaaaaaaaaaaaaaaaaaaaaaaaaaaaaaaaaaaaaaaaaaaaaaaaaaaaaaaaaaagaatt

SEQ ID NO: 1340 - RNA, 1804 nt, synthetic construct
  misc_feature 1..1804: note = Artificial____CBFbeta(1-165)_SMMHC(1527-1877) mRNA wt
  source 1..1804: mol_type = other RNA
aggagagtcccgcagtcggcgtccagcggctctgcttgttcgtgtgtgtgtcgttgcaggccttattcaagcttaccatgccgcgcgtcgtgcccgaccagagaagcaagttcgagaacgaggagttttttaggaagctgagccgcgagtgtgagattaagtacacgggcttcagggaccggccccacgaggaacgccaggcacgcttccagaacgcctgccgcgacggccgctcggaaatcgcttttgtggccacaggaaccaatctgtctctccagttttttccggccagctggcagggagaacagcgacaaacacctagccgagagtatgtcgacttagaaagagaagcaggcaaggtatatttgaaggctcccatgattctgaatggagtctgtgttatctggaaaggctggattgatctccaaagactggatggtatgggctgtctggagtttgatgaggagcgagcccagcaggaggatgcattagcacaacaggcctttgaagaggctcggagaaggacacgcgaatttgaagatagagacaggtctcatcgggaggaaatggaggtccatgagctggagaagtccaagcgggccctggagacccagatggaggagatgaagacgcagctggaagagctggaggacgagctgcaagccacggaggacgccaaactgcggctggaagtcaacatgcaggcgctcaagggccagttcgaaagggatctccaagcccgggacgagcagaatgaggagaagaggaggcaactgcagagacagcttcacgagtatgagacggaactggaagacgagcgaaagcaacgtgccctggcagctgcagcaaagaagaagctggaaggggacctgaaagacctggagcttcaggccgactctgccatcaaggggagggaggaagccatcaagcagctacgcaaactgcaggctcagatgaaggactttcaaagagagctggaagatgcccgtgcctccagagatgagatctttgccacagccaaagagaatgagaagaaagccaagagcttggaagcagacctcatgcagctacaagaggacctcgccgccgctgagagggctcgcaaacaagcggacctcgagaaggaggaactggcagaggagctggccagtagcctgtcgggaaggaacgcactccaggacgagaagcgccgcctggaggcccggatcgcccagctggaggaggagctggaggaggagcagggcaacatggaggccatgagcgaccgggtccgcaaagccacacagcaggccgagcagctcagcaacgagctggccacagagcgcagcacggcccagaagaatgagagtgcccggcagcagctcgagcggcagaacaaggagctccggagcaagctccacgagatggagggggccgtcaagtccaagttcaagtccaccatcgcggcgctggaggccaagattgcacagctggaggagcaggtcgagcaggaggccagagagaaacaggcggccaccaagtcgctgaagcagaaagacaagaagctgaaggaaatcttgctgcaggtggaggacgagcgcaagatggccgagcagtacaaggagcaggcagagaaaggcaatgcctgaggactagtccctgttcccagagcccacttttttttctttttttgaaataaaatagcctgtctttcagatctaaaaaaaaaaaaaaaaaaaaaaaaaaaaaaaaaaaaaaaaaaaaaaaaaaaaaaaaaaaaaaaaaaaaaaaaaaaaaaaaaaaaaaaaaaaaaaaaaaaagaatt

SEQ ID NO: 1341 - RNA, 865 nt, synthetic construct
  misc_feature 1..865: note = Artificial____CBFbeta(1-165)_Linker_Lifeact mRNA wt
  source 1..865: mol_type = other RNA
aggagagtcccgcagtcggcgtccagcggctctgcttgttcgtgtgtgtgtcgttgcaggccttattcaagcttaccatgccgcgcgtcgtgcccgaccagagaagcaagttcgagaacgaggagttttttaggaagctgagccgcgagtgtgagattaagtacacgggcttcagggaccggccccacgaggaacgccaggcacgcttccagaacgcctgccgcgacggccgctcggaaatcgcttttgtggccacaggaaccaatctgtctctccagttttttccggccagctggcagggagaacagcgacaaacacctagccgagagtatgtcgacttagaaagagaagcaggcaaggtatatttgaaggctcccatgattctgaatggagtctgtgttatctggaaaggctggattgatctccaaagactggatggtatgggctgtctggagtttgatgaggagcgagcccagcaggaggatgcattagcacaacaggcctttgaagaggctcggagaaggacacgcgaatttgaagatagagacaggtctcatcgggaggaaatggagggcgggagcggcgggtccggcgggagcggcggctccgggggcgggggcgtggccgacctgatcaagaagttcgagagcatcagcaaggaggagggggatccaccggtcgccacctgaggactagtccctgttcccagagcccacttttttttctttttttgaaataaaatagcctgtctttcagatctaaaaaaaaaaaaaaaaaaaaaaaaaaaaaaaaaaaaaaaaaaaaaaaaaaaaaaaaaaaaaaaaaaaaaaaaaaaaaaaaaaaaaaaaaaaaaaaaaaaagaatt

SEQ ID NO: 1342 - RNA, 832 nt, synthetic construct
  misc_feature 1..832: note = Artificial____CBFbeta(1-165)_HIF1alpha(549-575) mRNA wt
  source 1..832: mol_type = other RNA
aggagagtcccgcagtcggcgtccagcggctctgcttgttcgtgtgtgtgtcgttgcaggccttattcaagcttaccatgccgcgcgtcgtgcccgaccagagaagcaagttcgagaacgaggagttttttaggaagctgagccgcgagtgtgagattaagtacacgggcttcagggaccggccccacgaggaacgccaggcacgcttccagaacgcctgccgcgacggccgctcggaaatcgcttttgtggccacaggaaccaatctgtctctccagttttttccggccagctggcagggagaacagcgacaaacacctagccgagagtatgtcgacttagaaagagaagcaggcaaggtatatttgaaggctcccatgattctgaatggagtctgtgttatctggaaaggctggattgatctccaaagactggatggtatgggctgtctggagtttgatgaggagcgagcccagcaggaggatgcattagcacaacaggcctttgaagaggctcggagaaggacacgcgaatttgaagatagagacaggtctcatcgggaggaaatggagccattttctactcaggacacagatttagacttggagatgttagctccctatatcccaatggatgatgacttccagttacgttgaggactagtccctgttcccagagcccacttttttttctttttttgaaataaaatagcctgtctttcagatctaaaaaaaaaaaaaaaaaaaaaaaaaaaaaaaaaaaaaaaaaaaaaaaaaaaaaaaaaaaaaaaaaaaaaaaaaaaaaaaaaaaaaaaaaaaaaaaaaaaagaatt

SEQ ID NO: 1343 - RNA, 877 nt, synthetic construct
  misc_feature 1..877: note Artificial____CBFbeta(1-165)_Linker_HIF1alpha(549-575) mRNA wt
  source 1..877: mol_type = other RNA
aggagagtcccgcagtcggcgtccagcggctctgcttgttcgtgtgtgtgtcgttgcaggccttattcaagcttaccatgccgcgcgtcgtgcccgaccagagaagcaagttcgagaacgaggagttttttaggaagctgagccgcgagtgtgagattaagtacacgggcttcagggaccggccccacgaggaacgccaggcacgcttccagaacgcctgccgcgacggccgctcggaaatcgcttttgtggccacaggaaccaatctgtctctccagttttttccggccagctggcagggagaacagcgacaaacacctagccgagagtatgtcgacttagaaagagaagcaggcaaggtatatttgaaggctcccatgattctgaatggagtctgtgttatctggaaaggctggattgatctccaaagactggatggtatgggctgtctggagtttgatgaggagcgagcccagcaggaggatgcattagcacaacaggcctttgaagaggctcggagaaggacacgcgaatttgaagatagagacaggtctcatcgggaggaaatggagggcgggagcggcgggtccggcgggagcggcggctccgggggcgggccattttctactcaggacacagatttagacttggagatgttagctccctatatcccaatggatgatgacttccagttacgttgaggactagtccctgttcccagagcccacttttttttctttttttgaaataaaatagcctgtctttcagatctaaaaaaaaaaaaaaaaaaaaaaaaaaaaaaaaaaaaaaaaaaaaaaaaaaaaaaaaaaaaaaaaaaaaaaaaaaaaaaaaaaaaaaaaaaaaaaaaaaaagaatt

SEQ ID NO: 1344 - RNA, 2512 nt, synthetic construct
  misc_feature 1..2512: note = Artificial____RUNX1(1-177)_N_RUNX1T1a(31-604) mRNA wt
  source 1..2512: mol_type = other RNA
aggagagtcccgcagtcggcgtccagcggctctgcttgttcgtgtgtgtgtcgttgcaggccttattcaagcttaccatgcgtatccccgtagatgccagcacgagccgccgcttcacgccgccttccaccgcgctgagcccaggcaagatgagcgaggcgttgccgctgggcgccccggacgccggcgctgccctggccggcaagctgaggagcggcgaccgcagcatggtggaggtgctggccgaccacccgggcgagctggtgcgcaccgacagccccaacttcctctgctccgtgctgcctacgcactggcgctgcaacaagaccctgcccatcgctttcaaggtggtggccctaggggatgttccagatggcactctggtcactgtgatggctggcaatgatgaaaactactcggctgagctgagaaatgctaccgcagccatgaagaaccaggttgcaagatttaatgacctcaggtttgtcggtcgaagtggaagagggaaaagcttcactctgaccatcactgtcttcacaaacccaccgcaagtcgccacctaccacagagccatcaaaatcacagtggatgggccccgagaacctcgaaaccgtactgagaagcactccacaatgccagactcacctgtggatgtgaagacgcaatctaggctgactcctccaacaatgccacctcccccaactactcaaggagctccaagaaccagttcatttacaccgacaacgttaactaatggcacgagccattctcctacagccttgaatggcgccccctcaccacccaatggcttcagcaatgggccttcctcttcttcctcctcctctctggctaatcaacagctgcccccagcctgtggtgccaggcaactcagcaagctgaaaaggttccttactaccctgcagcagtttggcaatgacatttcacccgagataggagaaagagttcgcaccctcgttctgggactagtgaactccactttgacaattgaagaatttcattccaaactgcaagaagctactaacttcccactgagaccttttgtcatcccatttttgaaggccaacttgcccctgctgcagcgtgagctcctccactgcgcaagactggccaaacagaaccctgcccagtacctcgcccagcatgaacagctgcttctggatgccagcaccacctcacctgttgactcctcagagctgcttctcgatgtgaacgaaaacgggaagaggcgaactccagacagaaccaaagaaaatggctttgacagagagcctttgcactcagaacatccaagcaagcgaccatgcactattagcccaggccagcggtacagtccaaataacggcttatcctaccagcccaatggcctgcctcaccctaccccacctccacctcagcattaccgtttggatgatatggccattgcccaccactacagggactcctatcgacaccccagccacagggacctcagggacagaaacagacctatggggttgcatggcacacgtcaagaagaaatgattgatcacagactaacagacagagaatgggcagaagagtggaaacatcttgaccatctgttaaactgcataatggacatggtagaaaaaacaaggcgatctctcaccgtactaaggcggtgtcaagaagcagaccgggaagaattgaattactggatccggcggtacagtgacgccgaggacttaaaaaaaggtggcggcagtagcagcagccactctaggcagcagagtcccgtcaacccagacccagttgcactagacgcgcatcgggaattccttcacaggcctgcgtctggatacgtgccagaggagatctggaagaaagctgaggaggccgtcaatgaggtgaagcgccaggcgatgacggagctgcagaaggccgtgtctgaggcggagcggaaagcccacgacatgatcacaacagagagggccaagatggagcgcacggtcgccgaggccaaacggcaggcggcggaggacgcactggcagttatcaatcagcaggaggattcaagcgagagttgctggaattgtggccgtaaagcgagtgaaacctgcagtggctgtaacacagcccgatactgtggctcattttgccagcacaaagactgggagaagcaccatcacatctgtggacagaccctgcaggcccagcagcagggagacacacctgcagtcagctcctctgtcacgcccaacagcggggctgggagcccgatggacacaccaccagcagccactccgaggtcaaccaccccgggaaccccttccaccatagagacaacccctcgctgaggactagtccctgttcccagagcccacttttttttctttttttgaaataaaatagcctgtctttcagatctaaaaaaaaaaaaaaaaaaaaaaaaaaaaaaaaaaaaaaaaaaaaaaaaaaaaaaaaaaaaaaaaaaaaaaaaaaaaaaaaaaaaaaaaaaaaaaaaaaaagaatt

SEQ ID NO: 1345 - RNA, 1027 nt, synthetic construct
  misc_feature 1..1027: note = Artificial____RUNX1(1-241)_RUNX1T1b(short) mRNA wt
  source 1..1027: mol_type = other RNA
aggagagtcccgcagtcggcgtccagcggctctgcttgttcgtgtgtgtgtcgttgcaggccttattcaagcttaccatgcgtatccccgtagatgccagcacgagccgccgcttcacgccgccttccaccgcgctgagcccaggcaagatgagcgaggcgttgccgctgggcgccccggacgccggcgctgccctggccggcaagctgaggagcggcgaccgcagcatggtggaggtgctggccgaccacccgggcgagctggtgcgcaccgacagccccaacttcctctgctccgtgctgcctacgcactggcgctgcaacaagaccctgcccatcgctttcaaggtggtggccctaggggatgttccagatggcactctggtcactgtgatggctggcaatgatgaaaactactcggctgagctgagaaatgctaccgcagccatgaagaaccaggttgcaagatttaatgacctcaggtttgtcggtcgaagtggaagagggaaaagcttcactctgaccatcactgtcttcacaaacccaccgcaagtcgccacctaccacagagccatcaaaatcacagtggatgggccccgagaacctcgaagacatcggcagaaactagatgatcagaccaagcccgggagcttgtccttttccgagcggctcagtgaactggagcagctgcggcgcacagccatgagggtcagcccacaccacccagcccccacgcccaaccctcgtgcctccctgaaccactccactgcctttaaccctcagcctcagagtcagatgcaggaggtgggcttctgccacgtcgcccaggtggggctgaagctcctgggctgaggactagtccctgttcccagagcccacttttttttctttttttgaaataaaatagcctgtctttcagatctaaaaaaaaaaaaaaaaaaaaaaaaaaaaaaaaaaaaaaaaaaaaaaaaaaaaaaaaaaaaaaaaaaaaaaaaaaaaaaaaaaaaaaaaaaaaaaaaaaaagaatt

SEQ ID NO: 1346 - RNA, 2731 nt, synthetic construct
  misc_feature 1..2731: note = Artificial____RUNX1(1-241)_V_RUNX1T1b(22-604) mRNA wt
  source 1..2731: mol_type = other RNA
aggagagtcccgcagtcggcgtccagcggctctgcttgttcgtgtgtgtgtcgttgcaggccttattcaagcttaccatgcgtatccccgtagatgccagcacgagccgccgcttcacgccgccttccaccgcgctgagcccaggcaagatgagcgaggcgttgccgctgggcgccccggacgccggcgctgccctggccggcaagctgaggagcggcgaccgcagcatggtggaggtgctggccgaccacccgggcgagctggtgcgcaccgacagccccaacttcctctgctccgtgctgcctacgcactggcgctgcaacaagaccctgcccatcgctttcaaggtggtggccctaggggatgttccagatggcactctggtcactgtgatggctggcaatgatgaaaactactcggctgagctgagaaatgctaccgcagccatgaagaaccaggttgcaagatttaatgacctcaggtttgtcggtcgaagtggaagagggaaaagcttcactctgaccatcactgtcttcacaaacccaccgcaagtcgccacctaccacagagccatcaaaatcacagtggatgggccccgagaacctcgaagacatcggcagaaactagatgatcagaccaagcccgggagcttgtccttttccgagcggctcagtgaactggagcagctgcggcgcacagccatgagggtcagcccacaccacccagcccccacgcccaaccctcgtgcctccctgaaccactccactgcctttaaccctcagcctcagagtcagatgcaggtgggtcctgagaaaagggtgccagcgatgcctggatcgcctgtggaagtgaagatacagtccagatcctcacctcccaccatgccacccctcccaccaataaatcctggaggaccgaggccagtgtccttcactcctactgcattaagcaatggcatcaaccattctcctcctaccctgaatggtgccccatcaccgccacagagattcagcaatggtcctgcctcctccacatcatctgcactcacaaatcagcaattgccagccacttgtggtgctcgacaactcagcaagttgaaacgctttcttaccactctgcaacagtttggcaatgacatctcccctgagattggggagaaggtgcggactcttgttcttgcactggtgaactcaacagtgacaattgaggaattccactgtaagctccaagaagccacaaactttccccttcgtccttttgtgattccatttctcaaggccaacctgcccctgctgcagcgggaactgctgcactgcgctcgggcggccaagcagaccccatcccagtacctggctcagcacgaacaccttctgctcaacacaagcattgcatcgcctgctgactcgtcagagttgctcatggaggtgcacggaaatgggaagaggcccagtccagagaggagagaagagaatagttttgatagagacacaattgctcctgagcctcctgccaagagagtatgtaccatcagccctgctcctcggcacagtcctgctctcactgtgcccctcatgaatcccgggggccaattccatcctacccctccacctcttcagcattacaccttagaggatattgcaacttctcacctgtatcgggaacccaacaagatgctagagcatcgagaagttcgtgatagacaccacagtcttggtctaaatggaggctatcaagatgagttggtagatcatcgtttgacagaaagggaatgggctgatgaatggaaacatcttgaccatgcgctgaattgcattatggaaatggtagagaaaacaaggcgctctatggcagttctgcggcgctgtcaggaatcagatcgtgaagaactcaactactggaaaagacggtacaatgaaaacacagagctgaggaaaacggggaccgagttggtctccaggcagcacagccctgggagtgcagattctctcagcaatgattctcagagagagttcaacagcaggccaggtacaggatacgtacctgtggagttttggaaaaaaacagaagaagctgtgaataaggtgaaaattcaggccatgtcagaagtacagaaggccgtcgctgaggcagagcagaaagcctttgaagtgattgcaacagagagagcacgaatggagcaaaccatagcggatgtcaagcggcaggccgcagaggatgctttcctcgtcatcaatgagcaagaggagtccacggagaactgctggaactgtggccgcaaagccagcgagacatgcagtggctgcaatatcgcgcgatactgtggctctttctgccagcacaaggactgggagcggcaccaccgcctctgtggtcagaacctgcatggccagagcccccacggccagggccggccgctgcttcctgtaggcaggggctcctctgccaggtccgccgactgcagcgtgcccagcccagccctcgacaagacctcggcaaccacatcgcgttcctcaacacctgcttctgtgacagctatcgacaccaacggactctgaggactagtccctgttcccagagcccacttttttttctttttttgaaataaaatagcctgtctttcagatctaaaaaaaaaaaaaaaaaaaaaaaaaaaaaaaaaaaaaaaaaaaaaaaaaaaaaaaaaaaaaaaaaaaaaaaaaaaaaaaaaaaaaaaaaaaaaaaaaaaagaatt

SEQ ID NO: 1347 - RNA, 2731 nt, synthetic construct
  misc_feature 1..2731: note = Artificial____RUNX1(1-241)_I_RUNX1T1b(22-604) mRNA wt
  source 1..2731: mol_type = other RNA
aggagagtcccgcagtcggcgtccagcggctctgcttgttcgtgtgtgtgtcgttgcaggccttattcaagcttaccatgcgtatccccgtagatgccagcacgagccgccgcttcacgccgccttccaccgcgctgagcccaggcaagatgagcgaggcgttgccgctgggcgccccggacgccggcgctgccctggccggcaagctgaggagcggcgaccgcagcatggtggaggtgctggccgaccacccgggcgagctggtgcgcaccgacagccccaacttcctctgctccgtgctgcctacgcactggcgctgcaacaagaccctgcccatcgctttcaaggtggtggccctaggggatgttccagatggcactctggtcactgtgatggctggcaatgatgaaaactactcggctgagctgagaaatgctaccgcagccatgaagaaccaggttgcaagatttaatgacctcaggtttgtcggtcgaagtggaagagggaaaagcttcactctgaccatcactgtcttcacaaacccaccgcaagtcgccacctaccacagagccatcaaaatcacagtggatgggccccgagaacctcgaagacatcggcagaaactagatgatcagaccaagcccgggagcttgtccttttccgagcggctcagtgaactggagcagctgcggcgcacagccatgagggtcagcccacaccacccagcccccacgcccaaccctcgtgcctccctgaaccactccactgcctttaaccctcagcctcagagtcagatgcagatcggtcctgagaaaagggtgccagcgatgcctggatcgcctgtggaagtgaagatacagtccagatcctcacctcccaccatgccacccctcccaccaataaatcctggaggaccgaggccagtgtccttcactcctactgcattaagcaatggcatcaaccattctcctcctaccctgaatggtgccccatcaccgccacagagattcagcaatggtcctgcctcctccacatcatctgcactcacaaatcagcaattgccagccacttgtggtgctcgacaactcagcaagttgaaacgctttcttaccactctgcaacagtttggcaatgacatctcccctgagattggggagaaggtgcggactcttgttcttgcactggtgaactcaacagtgacaattgaggaattccactgtaagctccaagaagccacaaactttccccttcgtccttttgtgattccatttctcaaggccaacctgcccctgctgcagcgggaactgctgcactgcgctcgggcggccaagcagaccccatcccagtacctggctcagcacgaacaccttctgctcaacacaagcattgcatcgcctgctgactcgtcagagttgctcatggaggtgcacggaaatgggaagaggcccagtccagagaggagagaagagaatagttttgatagagacacaattgctcctgagcctcctgccaagagagtatgtaccatcagccctgctcctcggcacagtcctgctctcactgtgcccctcatgaatcccgggggccaattccatcctacccctccacctcttcagcattacaccttagaggatattgcaacttctcacctgtatcgggaacccaacaagatgctagagcatcgagaagttcgtgatagacaccacagtcttggtctaaatggaggctatcaagatgagttggtagatcatcgtttgacagaaagggaatgggctgatgaatggaaacatcttgaccatgcgctgaattgcattatggaaatggtagagaaaacaaggcgctctatggcagttctgcggcgctgtcaggaatcagatcgtgaagaactcaactactggaaaagacggtacaatgaaaacacagagctgaggaaaacggggaccgagttggtctccaggcagcacagccctgggagtgcagattctctcagcaatgattctcagagagagttcaacagcaggccaggtacaggatacgtacctgtggagttttggaaaaaaacagaagaagctgtgaataaggtgaaaattcaggccatgtcagaagtacagaaggccgtcgctgaggcagagcagaaagcctttgaagtgattgcaacagagagagcacgaatggagcaaaccatagcggatgtcaagcggcaggccgcagaggatgctttcctcgtcatcaatgagcaagaggagtccacggagaactgctggaactgtggccgcaaagccagcgagacatgcagtggctgcaatatcgcgcgatactgtggctctttctgccagcacaaggactgggagcggcaccaccgcctctgtggtcagaacctgcatggccagagcccccacggccagggccggccgctgcttcctgtaggcaggggctcctctgccaggtccgccgactgcagcgtgcccagcccagccctcgacaagacctcggcaaccacatcgcgttcctcaacacctgcttctgtgacagctatcgacaccaacggactctgaggactagtccctgttcccagagcccacttttttttctttttttgaaataaaatagcctgtctttcagatctaaaaaaaaaaaaaaaaaaaaaaaaaaaaaaaaaaaaaaaaaaaaaaaaaaaaaaaaaaaaaaaaaaaaaaaaaaaaaaaaaaaaaaaaaaaaaaaaaaaagaatt

SEQ ID NO: 1348 - RNA, 1615 nt, synthetic construct
  misc_feature 1..1615: note = Homo sapiens__Q01196-1__RUNX1(K83E_R174Q) mRNA wt mod
  source 1..1615: mol_type = other RNA
aggagagtcccgcagtcggcgtccagcggctctgcttgttcgtgtgtgtgtcgttgcaggccttattcaagcttaccatgcgtatccccgtagatgccagcacgagccgccgcttcacgccgccttccaccgcgctgagcccaggcaagatgagcgaggcgttgccgctgggcgccccggacgccggcgctgccctggccggcaagctgaggagcggcgaccgcagcatggtggaggtgctggccgaccacccgggcgagctggtgcgcaccgacagccccaacttcctctgctccgtgctgcctacgcactggcgctgcaacgagaccctgcccatcgctttcaaggtggtggccctaggggatgttccagatggcactctggtcactgtgatggctggcaatgatgaaaactactcggctgagctgagaaatgctaccgcagccatgaagaaccaggttgcaagatttaatgacctcaggtttgtcggtcgaagtggaagagggaaaagtttcactctgaccatcactgtcttcacaaacccaccgcaagtcgccacctaccacagagccatcaaaatcacagtggatgggccccaggaacctcgaagacatcggcagaaactagatgatcagaccaagcccgggagcttgtccttttccgagcggctcagtgaactggagcagctgcggcgcacagccatgagggtcagcccacaccacccagcccccacgcccaaccctcgtgcctccctgaaccactccactgcctttaaccctcagcctcagagtcagatgcaggatacaaggcagatccaaccatccccaccgtggtcctacgatcagtcctaccaatacctgggatccattgcctctccttctgtgcacccagcaacgcccatttcacctggacgtgccagcggcatgacaaccctctctgcagaactttccagtcgactctcaacggcacccgacctgacagcgttcagcgacccgcgccagttccccgcgctgccctccatctccgacccccgcatgcactatccaggcgccttcacctactccccgacgccggtcacctcgggcatcggcatcggcatgtcggccatgggctcggccacgcgctaccacacctacctgccgccgccctaccccggctcgtcgcaagcgcagggaggcccgttccaagccagctcgccctcctaccacctgtactacggcgcctcggccggctcctaccagttctccatggtgggcggcgagcgctcgccgccgcgcatcctgccgccctgcaccaacgcctccaccggctccgcgctgctcaaccccagcctcccgaaccagagcgacgtggtggaggccgagggcagccacagcaactcccccaccaacatggcgccctccgcgcgcctggaggaggccgtgtggaggccctactgaggactagtccctgttcccagagcccacttttttttctttttttgaaataaaatagcctgtctttcagatctaaaaaaaaaaaaaaaaaaaaaaaaaaaaaaaaaaaaaaaaaaaaaaaaaaaaaaaaaaaaaaaaaaaaaaaaaaaaaaaaaaaaaaaaaaaaaaaaaaaagaatt

SEQ ID NO: 1349 - RNA, 2089 nt, synthetic construct
  misc_feature 1..2089: note = Homo sapiens____CBFbeta(1-165)_SMMHC(1527-1972) mRNA wt mod
  source 1..2089: mol_type = other RNA
aggagagtcccgcagtcggcgtccagcggctctgcttgttcgtgtgtgtgtcgttgcaggccttattcaagcttaccatgccgcgcgtcgtgcccgaccagagaagcaagtttgagaacgaggagttctttaggaagctgagccgcgagtgtgagattaagtacacgggctttagggaccggccccacgaggaacgccaggcacgcttccagaacgcctgccgcgacggccgctcggaaatcgcttttgtggccacaggaaccaatctgtctctccagttctttccggccagctggcagggagaacagcgacaaacacctagccgagagtatgtcgacttagaaagagaagcaggcaaggtatatttgaaggctcccatgattctgaatggagtctgtgttatctggaaaggctggattgatctccaaagactggatggtatgggctgtctggagtttgatgaggagcgagcccagcaggaggatgcattagcacaacaggcctttgaagaggctcggagaaggacacgcgaatttgaagatagagacaggtctcatcgggaggaaatggaggtccatgagctggagaagtccaagcgggccctggagacccagatggaggagatgaagacgcagctggaggaactggaggacgagctgcaagccacggaggacgccaaactgcggctggaagtcaacatgcaggcgctcaagggccagttcgaaagggatctccaagcccgggacgagcagaatgaggagaagaggaggcaactgcagagacagcttcacgagtatgagacggaactggaagacgagcgaaagcaacgtgccctggcagctgcagcaaagaagaagctggaaggggacctgaaagacctggagcttcaggccgactctgccatcaaggggagggaggaagccatcaagcagctacgcaaactgcaggctcagatgaaggactttcaaagagagctggaagatgcccgtgcctccagagatgagatctttgccacagccaaagagaatgagaagaaagccaagagcttggaagcagacctcatgcagctacaagaggacctcgccgccgctgagagggctcgcaaacaagcggacctcgagaaggaggaactggcagaggagctggccagtagcctgtcgggaaggaacgcactccaggacgagaagcgccgcctggaggcccggatcgcccagctggaggaggagctggaggaggagcagggcaacatggaggccatgagcgaccgggtccgcaaagccacacagcaggccgagcagctcagcaacgagctggccacagagcgcagcacggcccagaagaatgagagtgcccggcagcagctcgagcggcagaacaaggagctccggagcaagctccacgagatggagggggccgtcaagtccaagttcaagtccaccatcgcggcgctggaggccaagattgcacagctggaggagcaggtcgagcaggaggccagagagaaacaggcggccaccaagtcgctgaagcagaaagacaagaagctgaaggaaatcttgctccaggtggaggacgagcgcaagatggccgagcagtacaaggagcaggcagagaaaggcaatgccagggtcaagcagctgaagaggcagctggaggaggcagaggaggagtcccagcgcatcaacgccaaccgcaggaagctgcagcgggagctggatgaggccacggagagcaacgaggccatgggccgcgaggtgaacgcactcaagagcaagctcaggcgaggaaacgagacctctttcgttccttctagaaggtctggaggacgtagagttattgaaaatgcagatggttctgaggaggaaacggacactcgagacgcagacttcaatggaaccaaggccagtgaatgaggactagtccctgttcccagagcccacttttttttctttttttgaaataaaatagcctgtctttcagatctaaaaaaaaaaaaaaaaaaaaaaaaaaaaaaaaaaaaaaaaaaaaaaaaaaaaaaaaaaaaaaaaaaaaaaaaaaaaaaaaaaaaaaaaaaaaaaaaaaaagaatt

SEQ ID NO: 1350 - RNA, 1804 nt, synthetic construct
  misc_feature 1..1804: note = Artificial____CBFbeta(1-165)_SMMHC(1527-1877) mRNA wt mod
  source 1..1804: mol_type = other RNA
aggagagtcccgcagtcggcgtccagcggctctgcttgttcgtgtgtgtgtcgttgcaggccttattcaagcttaccatgccgcgcgtcgtgcccgaccagagaagcaagtttgagaacgaggagttctttaggaagctgagccgcgagtgtgagattaagtacacgggctttagggaccggccccacgaggaacgccaggcacgcttccagaacgcctgccgcgacggccgctcggaaatcgcttttgtggccacaggaaccaatctgtctctccagttctttccggccagctggcagggagaacagcgacaaacacctagccgagagtatgtcgacttagaaagagaagcaggcaaggtatatttgaaggctcccatgattctgaatggagtctgtgttatctggaaaggctggattgatctccaaagactggatggtatgggctgtctggagtttgatgaggagcgagcccagcaggaggatgcattagcacaacaggcctttgaagaggctcggagaaggacacgcgaatttgaagatagagacaggtctcatcgggaggaaatggaggtccatgagctggagaagtccaagcgggccctggagacccagatggaggagatgaagacgcagctggaggaactggaggacgagctgcaagccacggaggacgccaaactgcggctggaagtcaacatgcaggcgctcaagggccagttcgaaagggatctccaagcccgggacgagcagaatgaggagaagaggaggcaactgcagagacagcttcacgagtatgagacggaactggaagacgagcgaaagcaacgtgccctggcagctgcagcaaagaagaagctggaaggggacctgaaagacctggagcttcaggccgactctgccatcaaggggagggaggaagccatcaagcagctacgcaaactgcaggctcagatgaaggactttcaaagagagctggaagatgcccgtgcctccagagatgagatctttgccacagccaaagagaatgagaagaaagccaagagcttggaagcagacctcatgcagctacaagaggacctcgccgccgctgagagggctcgcaaacaagcggacctcgagaaggaggaactggcagaggagctggccagtagcctgtcgggaaggaacgcactccaggacgagaagcgccgcctggaggcccggatcgcccagctggaggaggagctggaggaggagcagggcaacatggaggccatgagcgaccgggtccgcaaagccacacagcaggccgagcagctcagcaacgagctggccacagagcgcagcacggcccagaagaatgagagtgcccggcagcagctcgagcggcagaacaaggagctccggagcaagctccacgagatggagggggccgtcaagtccaagttcaagtccaccatcgcggcgctggaggccaagattgcacagctggaggagcaggtcgagcaggaggccagagagaaacaggcggccaccaagtcgctgaagcagaaagacaagaagctgaaggaaatcttgctccaggtggaggacgagcgcaagatggccgagcagtacaaggagcaggcagagaaaggcaatgcctgaggactagtccctgttcccagagcccacttttttttctttttttgaaataaaatagcctgtctttcagatctaaaaaaaaaaaaaaaaaaaaaaaaaaaaaaaaaaaaaaaaaaaaaaaaaaaaaaaaaaaaaaaaaaaaaaaaaaaaaaaaaaaaaaaaaaaaaaaaaaaagaatt

SEQ ID NO: 1351 - RNA, 865 nt, synthetic construct
  misc_feature 1..865: note = Artificial____CBFbeta(1-165)_Linker_Lifeact mRNA wt mod
  source 1..865: mol_type = other RNA
aggagagtcccgcagtcggcgtccagcggctctgcttgttcgtgtgtgtgtcgttgcaggccttattcaagcttaccatgccgcgcgtcgtgcccgaccagagaagcaagtttgagaacgaggagttctttaggaagctgagccgcgagtgtgagattaagtacacgggctttagggaccggccccacgaggaacgccaggcacgcttccagaacgcctgccgcgacggccgctcggaaatcgcttttgtggccacaggaaccaatctgtctctccagttctttccggccagctggcagggagaacagcgacaaacacctagccgagagtatgtcgacttagaaagagaagcaggcaaggtatatttgaaggctcccatgattctgaatggagtctgtgttatctggaaaggctggattgatctccaaagactggatggtatgggctgtctggagtttgatgaggagcgagcccagcaggaggatgcattagcacaacaggcctttgaagaggctcggagaaggacacgcgaatttgaagatagagacaggtctcatcgggaggaaatggagggcgggagcggcgggtccggcgggagcggcggctccgggggcgggggcgtggccgacctgatcaagaagttcgagagcatctccaaggaggagggggacccgcccgtcgccacctgaggactagtccctgttcccagagcccacttttttttctttttttgaaataaaatagcctgtctttcagatctaaaaaaaaaaaaaaaaaaaaaaaaaaaaaaaaaaaaaaaaaaaaaaaaaaaaaaaaaaaaaaaaaaaaaaaaaaaaaaaaaaaaaaaaaaaaaaaaaaaagaatt

SEQ ID NO: 1352 - RNA, 832 nt, synthetic construct
  misc_feature 1..832: note = Artificial____CBFbeta(1-165)_HIF1alpha(549-575) mRNA wt mod
  source 1..832: mol_type = other RNA
aggagagtcccgcagtcggcgtccagcggctctgcttgttcgtgtgtgtgtcgttgcaggccttattcaagcttaccatgccgcgcgtcgtgcccgaccagagaagcaagtttgagaacgaggagttctttaggaagctgagccgcgagtgtgagattaagtacacgggctttagggaccggccccacgaggaacgccaggcacgcttccagaacgcctgccgcgacggccgctcggaaatcgcttttgtggccacaggaaccaatctgtctctccagttctttccggccagctggcagggagaacagcgacaaacacctagccgagagtatgtcgacttagaaagagaagcaggcaaggtatatttgaaggctcccatgattctgaatggagtctgtgttatctggaaaggctggattgatctccaaagactggatggtatgggctgtctggagtttgatgaggagcgagcccagcaggaggatgcattagcacaacaggcctttgaagaggctcggagaaggacacgcgaatttgaagatagagacaggtctcatcgggaggaaatggagccattttctactcaggacacagatttagacttggagatgttagctccctatatcccaatggatgatgacttccagttacgttgaggactagtccctgttcccagagcccacttttttttctttttttgaaataaaatagcctgtctttcagatctaaaaaaaaaaaaaaaaaaaaaaaaaaaaaaaaaaaaaaaaaaaaaaaaaaaaaaaaaaaaaaaaaaaaaaaaaaaaaaaaaaaaaaaaaaaaaaaaaaaagaatt

SEQ ID NO: 1353 - RNA, 877 nt, synthetic construct
  misc_feature 1..877: note Artificial____CBFbeta(1-165)_Linker_HIF1alpha(549-575) mRNA wt mod
  source 1..877: mol_type = other RNA
aggagagtcccgcagtcggcgtccagcggctctgcttgttcgtgtgtgtgtcgttgcaggccttattcaagcttaccatgccgcgcgtcgtgcccgaccagagaagcaagtttgagaacgaggagttctttaggaagctgagccgcgagtgtgagattaagtacacgggctttagggaccggccccacgaggaacgccaggcacgcttccagaacgcctgccgcgacggccgctcggaaatcgcttttgtggccacaggaaccaatctgtctctccagttctttccggccagctggcagggagaacagcgacaaacacctagccgagagtatgtcgacttagaaagagaagcaggcaaggtatatttgaaggctcccatgattctgaatggagtctgtgttatctggaaaggctggattgatctccaaagactggatggtatgggctgtctggagtttgatgaggagcgagcccagcaggaggatgcattagcacaacaggcctttgaagaggctcggagaaggacacgcgaatttgaagatagagacaggtctcatcgggaggaaatggagggcgggagcggcgggtccggcgggagcggcggctccgggggcgggccattttctactcaggacacagatttagacttggagatgttagctccctatatcccaatggatgatgacttccagttacgttgaggactagtccctgttcccagagcccacttttttttctttttttgaaataaaatagcctgtctttcagatctaaaaaaaaaaaaaaaaaaaaaaaaaaaaaaaaaaaaaaaaaaaaaaaaaaaaaaaaaaaaaaaaaaaaaaaaaaaaaaaaaaaaaaaaaaaaaaaaaaaagaatt

SEQ ID NO: 1354 - RNA, 2512 nt, synthetic construct
  misc_feature 1..2512: note = Artificial____RUNX1(1-177)_N_RUNX1T1a(31-604) mRNA wt mod
  source 1..2512: mol_type = other RNA
aggagagtcccgcagtcggcgtccagcggctctgcttgttcgtgtgtgtgtcgttgcaggccttattcaagcttaccatgcgtatccccgtagatgccagcacgagccgccgcttcacgccgccttccaccgcgctgagcccaggcaagatgagcgaggcgttgccgctgggcgccccggacgccggcgctgccctggccggcaagctgaggagcggcgaccgcagcatggtggaggtgctggccgaccacccgggcgagctggtgcgcaccgacagccccaacttcctctgctccgtgctgcctacgcactggcgctgcaacaagaccctgcccatcgctttcaaggtggtggccctaggggatgttccagatggcactctggtcactgtgatggctggcaatgatgaaaactactcggctgagctgagaaatgctaccgcagccatgaagaaccaggttgcaagatttaatgacctcaggtttgtcggtcgaagtggaagagggaaaagtttcactctgaccatcactgtcttcacaaacccaccgcaagtcgccacctaccacagagccatcaaaatcacagtggatgggccccgagaacctcgaaaccgtactgagaagcactccacaatgccagactcacctgtggatgtgaagacgcaatctaggctgactcctccaacaatgccacctcccccaactactcaaggagctccaagaaccagttcatttacaccgacaacgttaactaatggcacgagccattctcctacagccttgaatggcgccccctcaccacccaatggcttcagcaatgggccttcctcttcttcctcctcctctctggctaatcaacagctgcccccagcctgtggtgccaggcaactcagcaagctgaaaaggttccttactaccctgcagcagtttggcaatgacatttcacccgagataggagaaagagttcgcaccctcgttctgggacttgtgaactccactttgacaattgaagaatttcattccaaactgcaagaagctactaacttcccactgagaccttttgtcatcccatttttgaaggccaacttgcccctgctgcagcgtgagctcctccactgcgcaagactggccaaacagaaccctgcccagtacctcgcccagcatgaacagctgcttctggatgccagcaccacctcacctgttgactcctcagagctgcttctcgatgtgaacgaaaacgggaagaggcgaactccagacagaaccaaagaaaatggctttgacagagagcctttgcactcagaacatccaagcaagcgaccatgcactattagcccaggccagcggtacagtccaaataacggcttatcctaccagcccaatggcctgcctcaccctaccccacctccacctcagcattaccgtttggatgatatggccattgcccaccactacagggactcctatcgacaccccagccacagggacctcagggacagaaacagacctatggggttgcatggcacacgtcaagaagaaatgattgatcacagactaacagacagagaatgggcagaagagtggaaacatcttgaccatctgttaaactgcataatggacatggtagaaaaaacaaggcgatctctcaccgtactaaggcggtgtcaagaagcagaccgggaagaattgaattactggatccggcggtacagtgacgccgaggacttaaaaaaaggtggcggcagtagcagcagccactctaggcagcagagtcccgtcaacccagacccagttgcactagacgcgcatcgggagttccttcacaggcctgcgtctggatacgtgccagaggagatctggaagaaagctgaggaggccgtcaatgaggtgaagcgccaggcgatgacggagctgcagaaggccgtgtctgaggcggagcggaaagcccacgacatgatcacaacagagagggccaagatggagcgcacggtcgccgaggccaaacggcaggcggcggaggacgcactggcagttatcaatcagcaggaggattcaagcgagagttgctggaattgtggccgtaaagcgagtgaaacctgcagtggctgtaacacagcccgatactgtggctcattttgccagcacaaagactgggagaagcaccatcacatctgtggacagaccctgcaggcccagcagcagggagacacacctgcagtcagctcctctgtcacgcccaacagcggggctgggagcccgatggacacaccaccagcagccactccgaggtcaaccaccccgggaaccccttccaccatagagacaacccctcgctgaggactagtccctgttcccagagcccacttttttttctttttttgaaataaaatagcctgtctttcagatctaaaaaaaaaaaaaaaaaaaaaaaaaaaaaaaaaaaaaaaaaaaaaaaaaaaaaaaaaaaaaaaaaaaaaaaaaaaaaaaaaaaaaaaaaaaaaaaaaaaagaatt

SEQ ID NO: 1355 - RNA, 1027 nt, synthetic construct
  misc_feature 1..1027: note = Artificial____RUNX1(1-241)_RUNX1T1b(short) mRNA wt mod
  source 1..1027: mol_type = other RNA
aggagagtcccgcagtcggcgtccagcggctctgcttgttcgtgtgtgtgtcgttgcaggccttattcaagcttaccatgcgtatccccgtagatgccagcacgagccgccgcttcacgccgccttccaccgcgctgagcccaggcaagatgagcgaggcgttgccgctgggcgccccggacgccggcgctgccctggccggcaagctgaggagcggcgaccgcagcatggtggaggtgctggccgaccacccgggcgagctggtgcgcaccgacagccccaacttcctctgctccgtgctgcctacgcactggcgctgcaacaagaccctgcccatcgctttcaaggtggtggccctaggggatgttccagatggcactctggtcactgtgatggctggcaatgatgaaaactactcggctgagctgagaaatgctaccgcagccatgaagaaccaggttgcaagatttaatgacctcaggtttgtcggtcgaagtggaagagggaaaagtttcactctgaccatcactgtcttcacaaacccaccgcaagtcgccacctaccacagagccatcaaaatcacagtggatgggccccgagaacctcgaagacatcggcagaaactagatgatcagaccaagcccgggagcttgtccttttccgagcggctcagtgaactggagcagctgcggcgcacagccatgagggtcagcccacaccacccagcccccacgcccaaccctcgtgcctccctgaaccactccactgcctttaaccctcagcctcagagtcagatgcaggaggtgggcttctgccacgtcgcccaggtggggctgaagctcctgggctgaggactagtccctgttcccagagcccacttttttttctttttttgaaataaaatagcctgtctttcagatctaaaaaaaaaaaaaaaaaaaaaaaaaaaaaaaaaaaaaaaaaaaaaaaaaaaaaaaaaaaaaaaaaaaaaaaaaaaaaaaaaaaaaaaaaaaaaaaaaaaagaatt

SEQ ID NO: 1356 - RNA, 2731 nt, synthetic construct
  misc_feature 1..2731: note = Artificial____RUNX1(1-241)_V_RUNX1T1b(22-604) mRNA wt mod
  source 1..2731: mol_type = other RNA
aggagagtcccgcagtcggcgtccagcggctctgcttgttcgtgtgtgtgtcgttgcaggccttattcaagcttaccatgcgtatccccgtagatgccagcacgagccgccgcttcacgccgccttccaccgcgctgagcccaggcaagatgagcgaggcgttgccgctgggcgccccggacgccggcgctgccctggccggcaagctgaggagcggcgaccgcagcatggtggaggtgctggccgaccacccgggcgagctggtgcgcaccgacagccccaacttcctctgctccgtgctgcctacgcactggcgctgcaacaagaccctgcccatcgctttcaaggtggtggccctaggggatgttccagatggcactctggtcactgtgatggctggcaatgatgaaaactactcggctgagctgagaaatgctaccgcagccatgaagaaccaggttgcaagatttaatgacctcaggtttgtcggtcgaagtggaagagggaaaagtttcactctgaccatcactgtcttcacaaacccaccgcaagtcgccacctaccacagagccatcaaaatcacagtggatgggccccgagaacctcgaagacatcggcagaaactagatgatcagaccaagcccgggagcttgtccttttccgagcggctcagtgaactggagcagctgcggcgcacagccatgagggtcagcccacaccacccagcccccacgcccaaccctcgtgcctccctgaaccactccactgcctttaaccctcagcctcagagtcagatgcaggtgggtcctgagaaaagggtgccagcgatgcctggatcgcctgtggaagtgaagatacagtccagatcctcacctcccaccatgccacccctcccaccaataaatcctggaggaccgaggccagtgtccttcactcctactgcattaagcaatggcatcaaccattctcctcctaccctgaatggtgccccatcaccgccacagagattcagcaatggtcctgcctcctccacatcatctgcactcacaaatcagcaattgccagccacttgtggtgctcgacaactcagcaagttgaaacgctttcttaccactctgcaacagtttggcaatgacatctcccctgagattggggagaaggtgcggactcttgttcttgcactggtgaactcaacagtgacaattgaggagttccactgtaagctccaagaagccacaaactttccccttcgtccttttgtgattccatttctcaaggccaacctgcccctgctgcagcgggaactgctgcactgcgctcgggcggccaagcagaccccatcccagtacctggctcagcacgaacaccttctgctcaacacaagcattgcatcgcctgctgactcgtcagagttgctcatggaggtgcacggaaatgggaagaggcccagtccagagaggagagaagagaatagttttgatagagacacaattgctcctgagcctcctgccaagagagtatgtaccatcagccctgctcctcggcacagtcctgctctcactgtgcccctcatgaatcccgggggccaattccatcctacccctccacctcttcagcattacaccttagaggatattgcaacttctcacctgtatcgggaacccaacaagatgctagagcatcgagaagttcgtgatagacaccacagtcttggtctaaatggaggctatcaagatgagttggtagatcatcgtttgacagaaagggaatgggctgatgaatggaaacatcttgaccatgcgctgaattgcattatggaaatggtagagaaaacaaggcgctctatggcagttctgcggcgctgtcaggaatcagatcgtgaagaactcaactactggaaaagacggtacaatgaaaacacagagctgaggaaaacggggaccgagttggtctccaggcagcacagccctgggagtgcagattctctcagcaatgattctcagagagagttcaacagcaggccaggtacaggatacgtacctgtggagttttggaagaaaacagaagaagctgtgaataaggtgaaaattcaggccatgtcagaagtacagaaggccgtcgctgaggcagagcagaaagcctttgaagtgattgcaacagagagagcacgaatggagcaaaccatagcggatgtcaagcggcaggccgcagaggatgctttcctcgtcatcaatgagcaagaggagtccacggagaactgctggaactgtggccgcaaagccagcgagacatgcagtggctgcaatatcgcgcgatactgtggctctttctgccagcacaaggactgggagcggcaccaccgcctctgtggtcagaacctgcatggccagagcccccacggccagggccggccgctgcttcctgtaggcaggggctcctctgccaggtccgccgactgcagcgtgcccagcccagccctcgacaagacctcggcaaccacatcgcgttcctcaacacctgcttctgtgacagctatcgacaccaacggactctgaggactagtccctgttcccagagcccacttttttttctttttttgaaataaaatagcctgtctttcagatctaaaaaaaaaaaaaaaaaaaaaaaaaaaaaaaaaaaaaaaaaaaaaaaaaaaaaaaaaaaaaaaaaaaaaaaaaaaaaaaaaaaaaaaaaaaaaaaaaaaagaatt

SEQ ID NO: 1357 - RNA, 2731 nt, synthetic construct
  misc_feature 1..2731: note = Artificial____RUNX1(1-241)_I_RUNX1T1b(22-604) mRNA wt mod
  source 1..2731: mol_type = other RNA
aggagagtcccgcagtcggcgtccagcggctctgcttgttcgtgtgtgtgtcgttgcaggccttattcaagcttaccatgcgtatccccgtagatgccagcacgagccgccgcttcacgccgccttccaccgcgctgagcccaggcaagatgagcgaggcgttgccgctgggcgccccggacgccggcgctgccctggccggcaagctgaggagcggcgaccgcagcatggtggaggtgctggccgaccacccgggcgagctggtgcgcaccgacagccccaacttcctctgctccgtgctgcctacgcactggcgctgcaacaagaccctgcccatcgctttcaaggtggtggccctaggggatgttccagatggcactctggtcactgtgatggctggcaatgatgaaaactactcggctgagctgagaaatgctaccgcagccatgaagaaccaggttgcaagatttaatgacctcaggtttgtcggtcgaagtggaagagggaaaagtttcactctgaccatcactgtcttcacaaacccaccgcaagtcgccacctaccacagagccatcaaaatcacagtggatgggccccgagaacctcgaagacatcggcagaaactagatgatcagaccaagcccgggagcttgtccttttccgagcggctcagtgaactggagcagctgcggcgcacagccatgagggtcagcccacaccacccagcccccacgcccaaccctcgtgcctccctgaaccactccactgcctttaaccctcagcctcagagtcagatgcagatcggtcctgagaaaagggtgccagcgatgcctggatcgcctgtggaagtgaagatacagtccagatcctcacctcccaccatgccacccctcccaccaataaatcctggaggaccgaggccagtgtccttcactcctactgcattaagcaatggcatcaaccattctcctcctaccctgaatggtgccccatcaccgccacagagattcagcaatggtcctgcctcctccacatcatctgcactcacaaatcagcaattgccagccacttgtggtgctcgacaactcagcaagttgaaacgctttcttaccactctgcaacagtttggcaatgacatctcccctgagattggggagaaggtgcggactcttgttcttgcactggtgaactcaacagtgacaattgaggagttccactgtaagctccaagaagccacaaactttccccttcgtccttttgtgattccatttctcaaggccaacctgcccctgctgcagcgggaactgctgcactgcgctcgggcggccaagcagaccccatcccagtacctggctcagcacgaacaccttctgctcaacacaagcattgcatcgcctgctgactcgtcagagttgctcatggaggtgcacggaaatgggaagaggcccagtccagagaggagagaagagaatagttttgatagagacacaattgctcctgagcctcctgccaagagagtatgtaccatcagccctgctcctcggcacagtcctgctctcactgtgcccctcatgaatcccgggggccaattccatcctacccctccacctcttcagcattacaccttagaggatattgcaacttctcacctgtatcgggaacccaacaagatgctagagcatcgagaagttcgtgatagacaccacagtcttggtctaaatggaggctatcaagatgagttggtagatcatcgtttgacagaaagggaatgggctgatgaatggaaacatcttgaccatgcgctgaattgcattatggaaatggtagagaaaacaaggcgctctatggcagttctgcggcgctgtcaggaatcagatcgtgaagaactcaactactggaaaagacggtacaatgaaaacacagagctgaggaaaacggggaccgagttggtctccaggcagcacagccctgggagtgcagattctctcagcaatgattctcagagagagttcaacagcaggccaggtacaggatacgtacctgtggagttttggaagaaaacagaagaagctgtgaataaggtgaaaattcaggccatgtcagaagtacagaaggccgtcgctgaggcagagcagaaagcctttgaagtgattgcaacagagagagcacgaatggagcaaaccatagcggatgtcaagcggcaggccgcagaggatgctttcctcgtcatcaatgagcaagaggagtccacggagaactgctggaactgtggccgcaaagccagcgagacatgcagtggctgcaatatcgcgcgatactgtggctctttctgccagcacaaggactgggagcggcaccaccgcctctgtggtcagaacctgcatggccagagcccccacggccagggccggccgctgcttcctgtaggcaggggctcctctgccaggtccgccgactgcagcgtgcccagcccagccctcgacaagacctcggcaaccacatcgcgttcctcaacacctgcttctgtgacagctatcgacaccaacggactctgaggactagtccctgttcccagagcccacttttttttctttttttgaaataaaatagcctgtctttcagatctaaaaaaaaaaaaaaaaaaaaaaaaaaaaaaaaaaaaaaaaaaaaaaaaaaaaaaaaaaaaaaaaaaaaaaaaaaaaaaaaaaaaaaaaaaaaaaaaaaaagaatt

SEQ ID NO: 1358 - RNA, 1615 nt, synthetic construct
  misc_feature 1..1615: note = Homo sapiens__Q01196-1__RUNX1(K83E_R174Q) mRNA opt1
  source 1..1615: mol_type = other RNA
aggagagtcccgcagtcggcgtccagcggctctgcttgttcgtgtgtgtgtcgttgcaggccttattcaagcttaccatgcgcatccccgtggacgccagcacctcccggcgcttcaccccgcccagcacggccctgtcccccggcaagatgagcgaggcgctccccctgggggccccggacgccggcgccgccctggcggggaagctccggtccggcgaccgcagcatggtcgaggtgctggccgaccaccccggggagctggtgcggaccgactcccccaacttcctctgcagcgtcctgcccacccactggcgctgcaacgagaccctgccgatcgccttcaaggtggtggccctcggcgacgtccccgacggcacgctggtgaccgtgatggcggggaacgacgagaactactccgccgagctgcggaacgccaccgccgccatgaagaaccaggtcgcgcgcttcaacgacctccggttcgtgggccgcagcgggcggggcaagtccttcaccctgacgatcaccgtgttcaccaacccgccccaggtcgccacctaccaccgcgccatcaagatcacggtggacgggccccaggagccccgccggcaccgccagaagctggacgaccagaccaagcccggcagcctctccttcagcgagcggctgtccgagctggagcagctccgccggaccgccatgcgcgtgagcccccaccacccggcccccacccccaacccccgggcgtccctgaaccacagcacggccttcaacccgcagccccagtcccagatgcaggacacccgccagatccagcccagcccgccctggagctacgaccagtcctaccagtacctgggcagcatcgcctcccccagcgtccaccccgccacccccatctccccggggcgcgccagcggcatgaccacgctctccgcggagctgagctcccggctgagcaccgcccccgacctcaccgccttctccgacccccgccagttcccggccctgcccagcatctccgacccccggatgcactaccccggggccttcacctacagcccgacgcccgtgacctccggcatcggcatcgggatgagcgcgatgggctccgccacccgctaccacacctacctgcccccgccctaccccgggagctcccaggcccagggcgggcccttccaggccagcagcccctcctaccacctctactacggcgcgagcgccggctcctaccagttcagcatggtcgggggcgagcggtccccgccccgcatcctgccgccctgcacgaacgccagcaccgggtccgccctgctcaaccccagcctgcccaaccagtccgacgtggtggaggccgagggcagccactccaacagccccaccaacatggcgccctccgcccggctggaggaggccgtgtggcgcccgtactgaggactagtccctgttcccagagcccacttttttttctttttttgaaataaaatagcctgtctttcagatctaaaaaaaaaaaaaaaaaaaaaaaaaaaaaaaaaaaaaaaaaaaaaaaaaaaaaaaaaaaaaaaaaaaaaaaaaaaaaaaaaaaaaaaaaaaaaaaaaaaagaatt

SEQ ID NO: 1359 - RNA, 2089 nt, synthetic construct
  misc_feature 1..2089: note = Homo sapiens____CBFbeta(1-165)_SMMHC(1527-1972) mRNA opt1
  source 1..2089: mol_type = other RNA
aggagagtcccgcagtcggcgtccagcggctctgcttgttcgtgtgtgtgtcgttgcaggccttattcaagcttaccatgccccgcgtggtcccggaccagcggagcaagttcgagaacgaggagttcttccgcaagctgtcccgggagtgcgagatcaagtacaccggcttccgcgaccggccccacgaggagcgccaggcccggttccagaacgcctgccgcgacgggcggagcgagatcgcgttcgtggccaccggcacgaacctctccctgcagttcttccccgccagctggcagggggagcagcgccagaccccctcccgggagtacgtggacctggagcgcgaggccggcaaggtctacctcaaggccccgatgatcctgaacggggtgtgcgtgatctggaagggctggatcgacctgcagcggctcgacggcatggggtgcctggagttcgacgaggagcgcgcgcagcaggaggacgccctggcccagcaggccttcgaggaggcgcggcgccggacccgcgagttcgaggaccgggaccgcagccaccgggaggagatggaggtgcacgagctggagaagtccaagcgcgccctcgagacccagatggaggagatgaagacccagctggaggagctggaggacgagctccaggccacggaggacgcgaagctgcggctggaggtcaacatgcaggccctcaagggccagttcgagcgcgacctgcaggcccgggacgagcagaacgaggagaagcgccggcagctgcagcgccagctccacgagtacgagaccgagctggaggacgagcggaagcagcgcgccctggccgcggccgccaagaagaagctcgagggggacctgaaggacctggagctccaggccgacagcgcgatcaagggccgggaggaggccatcaagcagctgcgcaagctgcaggcccagatgaaggacttccagcgggagctcgaggacgcccgcgccagccgggacgagatcttcgcgaccgccaaggagaacgagaagaaggccaagtccctggaggccgacctgatgcagctccaggaggacctggccgcggccgagcgcgcccggaagcaggccgacctggagaaggaggagctcgccgaggagctggcgagctccctgagcgggcgcaacgccctccaggacgagaagcggcgcctggaggcccggatcgcccagctggaggaggagctcgaggaggagcagggcaacatggaggccatgtccgaccgcgtgcggaaggcgacccagcaggccgagcagctgagcaacgagctggccacggagcgctccaccgcccagaagaacgagagcgcgcgccagcagctcgagcggcagaacaaggagctgcgctccaagctgcacgagatggagggggccgtgaagtccaagttcaagagcaccatcgccgccctcgaggccaagatcgcgcagctggaggagcaggtcgagcaggaggcccgggagaagcaggccgccaccaagagcctgaagcagaaggacaagaagctcaaggagatcctgctccaggtggaggacgagcgcaagatggccgagcagtacaaggagcaggcggagaagggcaacgcccgggtgaagcagctgaagcgccagctggaggaggccgaggaggagtcccagcggatcaacgccaaccgccggaagctgcagcgcgagctcgacgaggccacggagagcaacgaggcgatgggccgggaggtcaacgccctgaagtccaagctgcgccgggggaacgagaccagcttcgtgccctcccgccggagcggcgggcgccgggtgatcgagaacgccgacggcagcgaggaggagaccgacacccgcgacgccgacttcaacgggacgaaggcgtccgagtgaggactagtccctgttcccagagcccacttttttttctttttttgaaataaaatagcctgtctttcagatctaaaaaaaaaaaaaaaaaaaaaaaaaaaaaaaaaaaaaaaaaaaaaaaaaaaaaaaaaaaaaaaaaaaaaaaaaaaaaaaaaaaaaaaaaaaaaaaaaaaagaatt

SEQ ID NO: 1360 - RNA, 1804 nt, synthetic construct
  misc_feature 1..1804: note = Artificial____CBFbeta(1-165)_SMMHC(1527-1877) mRNA opt1
  source 1..1804: mol_type = other RNA
aggagagtcccgcagtcggcgtccagcggctctgcttgttcgtgtgtgtgtcgttgcaggccttattcaagcttaccatgccccgcgtggtcccggaccagcggagcaagttcgagaacgaggagttcttccgcaagctgtcccgggagtgcgagatcaagtacaccggcttccgcgaccggccccacgaggagcgccaggcccggttccagaacgcctgccgcgacgggcggagcgagatcgcgttcgtggccaccggcacgaacctctccctgcagttcttccccgccagctggcagggggagcagcgccagaccccctcccgggagtacgtggacctggagcgcgaggccggcaaggtctacctcaaggccccgatgatcctgaacggggtgtgcgtgatctggaagggctggatcgacctgcagcggctcgacggcatggggtgcctggagttcgacgaggagcgcgcgcagcaggaggacgccctggcccagcaggccttcgaggaggcgcggcgccggacccgcgagttcgaggaccgggaccgcagccaccgggaggagatggaggtgcacgagctggagaagtccaagcgcgccctcgagacccagatggaggagatgaagacccagctggaggagctggaggacgagctccaggccacggaggacgcgaagctgcggctggaggtcaacatgcaggccctcaagggccagttcgagcgcgacctgcaggcccgggacgagcagaacgaggagaagcgccggcagctgcagcgccagctccacgagtacgagaccgagctggaggacgagcggaagcagcgcgccctggccgcggccgccaagaagaagctcgagggggacctgaaggacctggagctccaggccgacagcgcgatcaagggccgggaggaggccatcaagcagctgcgcaagctgcaggcccagatgaaggacttccagcgggagctcgaggacgcccgcgccagccgggacgagatcttcgcgaccgccaaggagaacgagaagaaggccaagtccctggaggccgacctgatgcagctccaggaggacctggccgcggccgagcgcgcccggaagcaggccgacctggagaaggaggagctcgccgaggagctggcgagctccctgagcgggcgcaacgccctccaggacgagaagcggcgcctggaggcccggatcgcccagctggaggaggagctcgaggaggagcagggcaacatggaggccatgtccgaccgcgtgcggaaggcgacccagcaggccgagcagctgagcaacgagctggccacggagcgctccaccgcccagaagaacgagagcgcgcgccagcagctcgagcggcagaacaaggagctgcgctccaagctgcacgagatggagggggccgtgaagtccaagttcaagagcaccatcgccgccctcgaggccaagatcgcgcagctggaggagcaggtcgagcaggaggcccgggagaagcaggccgccaccaagagcctgaagcagaaggacaagaagctcaaggagatcctgctccaggtggaggacgagcgcaagatggccgagcagtacaaggagcaggcggagaagggcaacgcctgaggactagtccctgttcccagagcccacttttttttctttttttgaaataaaatagcctgtctttcagatctaaaaaaaaaaaaaaaaaaaaaaaaaaaaaaaaaaaaaaaaaaaaaaaaaaaaaaaaaaaaaaaaaaaaaaaaaaaaaaaaaaaaaaaaaaaaaaaaaaaagaatt

SEQ ID NO: 1361 - RNA, 865 nt, synthetic construct
  misc_feature 1..865: note = Artificial____CBFbeta(1-165)_Linker_Lifeact mRNA opt1
  source 1..865: mol_type = other RNA
aggagagtcccgcagtcggcgtccagcggctctgcttgttcgtgtgtgtgtcgttgcaggccttattcaagcttaccatgccccgcgtggtcccggaccagcggagcaagttcgagaacgaggagttcttccgcaagctgtcccgggagtgcgagatcaagtacaccggcttccgcgaccggccccacgaggagcgccaggcccggttccagaacgcctgccgcgacgggcggagcgagatcgcgttcgtggccaccggcacgaacctctccctgcagttcttccccgccagctggcagggggagcagcgccagaccccctcccgggagtacgtggacctggagcgcgaggccggcaaggtctacctcaaggccccgatgatcctgaacggggtgtgcgtgatctggaagggctggatcgacctgcagcggctcgacggcatggggtgcctggagttcgacgaggagcgcgcgcagcaggaggacgccctggcccagcaggccttcgaggaggcgcggcgccggacccgcgagttcgaggaccgggaccgcagccaccgggaggagatggagggcgggagcggcgggtccggcgggagcggcggctccgggggcgggggcgtggccgacctgatcaagaagttcgagagcatctccaaggaggagggggacccgcccgtcgccacctgaggactagtccctgttcccagagcccacttttttttctttttttgaaataaaatagcctgtctttcagatctaaaaaaaaaaaaaaaaaaaaaaaaaaaaaaaaaaaaaaaaaaaaaaaaaaaaaaaaaaaaaaaaaaaaaaaaaaaaaaaaaaaaaaaaaaaaaaaaaaaagaatt

SEQ ID NO: 1362 - RNA, 832 nt, synthetic construct
  misc_feature 1..832: note = Artificial____CBFbeta(1-165)_HIF1alpha(549-575) mRNA opt1
  source 1..832: mol_type = other RNA
aggagagtcccgcagtcggcgtccagcggctctgcttgttcgtgtgtgtgtcgttgcaggccttattcaagcttaccatgccccgcgtggtcccggaccagcggagcaagttcgagaacgaggagttcttccgcaagctgtcccgggagtgcgagatcaagtacaccggcttccgcgaccggccccacgaggagcgccaggcccggttccagaacgcctgccgcgacgggcggagcgagatcgcgttcgtggccaccggcacgaacctctccctgcagttcttccccgccagctggcagggggagcagcgccagaccccctcccgggagtacgtggacctggagcgcgaggccggcaaggtctacctcaaggccccgatgatcctgaacggggtgtgcgtgatctggaagggctggatcgacctgcagcggctcgacggcatggggtgcctggagttcgacgaggagcgcgcgcagcaggaggacgccctggcccagcaggccttcgaggaggcgcggcgccggacccgcgagttcgaggaccgggaccgcagccaccgggaggagatggagcccttcagcacccaggacaccgacctggacctcgagatgctggccccgtacatccccatggacgacgacttccagctgcgctgaggactagtccctgttcccagagcccacttttttttctttttttgaaataaaatagcctgtctttcagatctaaaaaaaaaaaaaaaaaaaaaaaaaaaaaaaaaaaaaaaaaaaaaaaaaaaaaaaaaaaaaaaaaaaaaaaaaaaaaaaaaaaaaaaaaaaaaaaaaaaagaatt

SEQ ID NO: 1363 - RNA, 877 nt, synthetic construct
  misc_feature 1..877: note Artificial____CBFbeta(1-165)_Linker_HIF1alpha(549-575) mRNA opt1
  source 1..877: mol_type = other RNA
aggagagtcccgcagtcggcgtccagcggctctgcttgttcgtgtgtgtgtcgttgcaggccttattcaagcttaccatgccccgcgtggtcccggaccagcggagcaagttcgagaacgaggagttcttccgcaagctgtcccgggagtgcgagatcaagtacaccggcttccgcgaccggccccacgaggagcgccaggcccggttccagaacgcctgccgcgacgggcggagcgagatcgcgttcgtggccaccggcacgaacctctccctgcagttcttccccgccagctggcagggggagcagcgccagaccccctcccgggagtacgtggacctggagcgcgaggccggcaaggtctacctcaaggccccgatgatcctgaacggggtgtgcgtgatctggaagggctggatcgacctgcagcggctcgacggcatggggtgcctggagttcgacgaggagcgcgcgcagcaggaggacgccctggcccagcaggccttcgaggaggcgcggcgccggacccgcgagttcgaggaccgggaccgcagccaccgggaggagatggagggcgggagcggcgggtccggcgggagcggcggctccgggggcgggcccttcagcacccaggacaccgacctggacctcgagatgctggccccgtacatccccatggacgacgacttccagctgcgctgaggactagtccctgttcccagagcccacttttttttctttttttgaaataaaatagcctgtctttcagatctaaaaaaaaaaaaaaaaaaaaaaaaaaaaaaaaaaaaaaaaaaaaaaaaaaaaaaaaaaaaaaaaaaaaaaaaaaaaaaaaaaaaaaaaaaaaaaaaaaaagaatt

SEQ ID NO: 1364 - RNA, 2512 nt, synthetic construct
  misc_feature 1..2512: note = Artificial____RUNX1(1-177)_N_RUNX1T1a(31-604) mRNA opt1
  source 1..2512: mol_type = other RNA
aggagagtcccgcagtcggcgtccagcggctctgcttgttcgtgtgtgtgtcgttgcaggccttattcaagcttaccatgcgcatccccgtggacgccagcacctcccggcgcttcaccccgcccagcacggccctgtcccccggcaagatgagcgaggcgctccccctgggggccccggacgccggcgccgccctggcggggaagctccggtccggcgaccgcagcatggtcgaggtgctggccgaccaccccggggagctggtgcggaccgactcccccaacttcctctgcagcgtcctgcccacccactggcgctgcaacaagaccctgccgatcgccttcaaggtggtggccctcggcgacgtccccgacggcacgctggtgaccgtgatggcggggaacgacgagaactactccgccgagctgcggaacgccaccgccgccatgaagaaccaggtcgcgcgcttcaacgacctccggttcgtgggccgcagcgggcggggcaagtccttcaccctgacgatcaccgtgttcaccaacccgccccaggtcgccacctaccaccgcgccatcaagatcacggtggacgggccccgggagccccgcaaccggaccgagaagcacagcacgatgcccgactccccggtggacgtgaagacccagagccgcctgaccccgcccaccatgcccccgccgcccacgacccagggcgcgccccggacctccagcttcacccccacgaccctgaccaacgggacctcccacagccccacggccctcaacggcgccccctccccgcccaacgggttcagcaacggcccctccagctccagctccagctccctggccaaccagcagctgccgcccgcctgcggcgcccgccagctcagcaagctgaagcggttcctgaccaccctccagcagttcgggaacgacatctcccccgagatcggcgagcgcgtccggaccctggtgctggggctcgtgaacagcacgctgaccatcgaggagttccacagcaagctgcaggaggcgaccaacttccccctccgccccttcgtcatccccttcctgaaggccaacctgcccctcctgcagcgggagctgctccactgcgcccgcctggccaagcagaaccccgcgcagtacctggcccagcacgagcagctcctgctggacgcctccaccacgagccccgtggactccagcgagctcctgctggacgtgaacgagaacggcaagcggcgcacccccgaccggaccaaggagaacgggttcgaccgcgagccgctccactccgagcaccccagcaagcggccctgcaccatctcccccggccagcgctacagcccgaacaacggcctgtcctaccagcccaacgggctgccccacccgacgcccccgccgccccagcactaccggctcgacgacatggccatcgcccaccactaccgcgacagctaccggcacccctcccaccgcgacctgcgcgaccggaaccgccccatgggcctgcacgggacccggcaggaggagatgatcgaccaccgcctcaccgaccgggagtgggcggaggagtggaagcacctggaccacctcctgaactgcatcatggacatggtcgagaagacccgccggagcctgacggtgctgcgccggtgccaggaggccgaccgcgaggagctcaactactggatccggcgctactccgacgccgaggacctgaagaagggcggcgggagctccagctcccacagccggcagcagtcccccgtgaaccccgaccccgtcgccctggacgcccaccgcgagttcctccaccggcccgcgagcggctacgtgcccgaggagatctggaagaaggccgaggaggccgtgaacgaggtcaagcgccaggccatgaccgagctgcagaaggccgtgagcgaggcggagcggaaggcccacgacatgatcaccaccgagcgcgccaagatggagcggacggtggccgaggccaagcgccaggcggccgaggacgccctggccgtcatcaaccagcaggaggactccagcgagtcctgctggaactgcgggcgcaaggcgagcgagacctgctccggctgcaacaccgcccggtactgcgggagcttctgccagcacaaggactgggagaagcaccaccacatctgcggccagaccctgcaggcccagcagcagggcgacacgccggccgtgtccagctccgtgacccccaacagcggggccggctcccccatggacacgcccccggcggccacgccccgcagcaccacccccgggaccccctccaccatcgagaccaccccgcggtgaggactagtccctgttcccagagcccacttttttttctttttttgaaataaaatagcctgtctttcagatctaaaaaaaaaaaaaaaaaaaaaaaaaaaaaaaaaaaaaaaaaaaaaaaaaaaaaaaaaaaaaaaaaaaaaaaaaaaaaaaaaaaaaaaaaaaaaaaaaaaagaatt

SEQ ID NO: 1365 - RNA, 1027 nt, synthetic construct
  misc_feature 1..1027: note = Artificial____RUNX1(1-241)_RUNX1T1b(short) mRNA opt1
  source 1..1027: mol_type = other RNA
aggagagtcccgcagtcggcgtccagcggctctgcttgttcgtgtgtgtgtcgttgcaggccttattcaagcttaccatgcgcatccccgtggacgccagcacctcccggcgcttcaccccgcccagcacggccctgtcccccggcaagatgagcgaggcgctccccctgggggccccggacgccggcgccgccctggcggggaagctccggtccggcgaccgcagcatggtcgaggtgctggccgaccaccccggggagctggtgcggaccgactcccccaacttcctctgcagcgtcctgcccacccactggcgctgcaacaagaccctgccgatcgccttcaaggtggtggccctcggcgacgtccccgacggcacgctggtgaccgtgatggcggggaacgacgagaactactccgccgagctgcggaacgccaccgccgccatgaagaaccaggtcgcgcgcttcaacgacctccggttcgtgggccgcagcgggcggggcaagtccttcaccctgacgatcaccgtgttcaccaacccgccccaggtcgccacctaccaccgcgccatcaagatcacggtggacgggccccgggagccccgccggcaccgccagaagctggacgaccagaccaagcccggcagcctctccttcagcgagcggctgtccgagctggagcagctccgccggaccgccatgcgcgtgagcccccaccacccggcccccacccccaacccccgggcgtccctgaaccacagcacggccttcaacccgcagccccagtcccagatgcaggaggtgggcttctgccacgtcgcccaggtggggctgaagctcctgggctgaggactagtccctgttcccagagcccacttttttttctttttttgaaataaaatagcctgtctttcagatctaaaaaaaaaaaaaaaaaaaaaaaaaaaaaaaaaaaaaaaaaaaaaaaaaaaaaaaaaaaaaaaaaaaaaaaaaaaaaaaaaaaaaaaaaaaaaaaaaaaagaatt

SEQ ID NO: 1366 - RNA, 2731 nt, synthetic construct
  misc_feature 1..2731: note = Artificial____RUNX1(1-241)_V_RUNX1T1b(22-604) mRNA opt1
  source 1..2731: mol_type = other RNA
aggagagtcccgcagtcggcgtccagcggctctgcttgttcgtgtgtgtgtcgttgcaggccttattcaagcttaccatgcgcatccccgtggacgccagcacctcccggcgcttcaccccgcccagcacggccctgtcccccggcaagatgagcgaggcgctccccctgggggccccggacgccggcgccgccctggcggggaagctccggtccggcgaccgcagcatggtcgaggtgctggccgaccaccccggggagctggtgcggaccgactcccccaacttcctctgcagcgtcctgcccacccactggcgctgcaacaagaccctgccgatcgccttcaaggtggtggccctcggcgacgtccccgacggcacgctggtgaccgtgatggcggggaacgacgagaactactccgccgagctgcggaacgccaccgccgccatgaagaaccaggtcgcgcgcttcaacgacctccggttcgtgggccgcagcgggcggggcaagtccttcaccctgacgatcaccgtgttcaccaacccgccccaggtcgccacctaccaccgcgccatcaagatcacggtggacgggccccgggagccccgccggcaccgccagaagctggacgaccagaccaagcccggcagcctctccttcagcgagcggctgtccgagctggagcagctccgccggaccgccatgcgcgtgagcccccaccacccggcccccacccccaacccccgggcgtccctgaaccacagcacggccttcaacccgcagccccagtcccagatgcaggtggggcccgagaagcgggtgccggcgatgcccggcagccccgtggaggtcaagatccagtcccgcagctccccgcccaccatgccgcccctgccgcccatcaaccccgggggcccccggcccgtgagcttcacccccacggccctgtccaacgggatcaaccactccccgcccaccctcaacggcgcccccagcccgccccagcgcttcagcaacggccccgcctccagcacctccagcgccctgaccaaccagcagctgcccgcgacgtgcggggcccggcagctctccaagctgaagcgcttcctgaccaccctccagcagttcggcaacgacatcagccccgagatcggggagaaggtgcggaccctggtcctggccctcgtgaactccacggtgaccatcgaggagttccactgcaagctgcaggaggccaccaacttccccctgcgccccttcgtcatccccttcctcaaggcgaacctgccgctgctccagcgggagctgctgcactgcgcccgcgccgccaagcagacccccagccagtacctcgcccagcacgagcacctcctgctgaacacgtccatcgcgagccccgccgacagctccgagctgctgatggaggtgcacggcaacgggaagcggcccagcccggagcgccgggaggagaactccttcgaccgcgacaccatcgcccccgagcccccggccaagcgggtgtgcaccatcagccccgcgccccgccactcccccgccctcaccgtcccgctgatgaaccccggcggccagttccaccccacgcccccgcccctgcagcactacaccctcgaggacatcgccaccagccacctgtaccgggagcccaacaagatgctggagcaccgcgaggtgcgggaccgccaccactccctcgggctgaacggcgggtaccaggacgagctggtggaccaccggctcaccgagcgcgagtgggccgacgagtggaagcacctggaccacgccctgaactgcatcatggagatggtcgagaagacgcgccggagcatggccgtgctccgccggtgccaggagtccgaccgcgaggagctgaactactggaagcggcgctacaacgagaacaccgagctgcggaagaccggcaccgagctcgtgagccgccagcactcccccggcagcgcggactccctgagcaacgactcccagcgggagttcaacagccgcccggggacgggctacgtccccgtggagttctggaagaagaccgaggaggccgtgaacaaggtcaagatccaggccatgtccgaggtgcagaaggccgtggccgaggcggagcagaaggccttcgaggtcatcgccaccgagcgggcccgcatggagcagaccatcgcggacgtgaagcggcaggccgccgaggacgccttcctggtcatcaacgagcaggaggagagcacggagaactgctggaactgcgggcgcaaggcctccgagacctgcagcggctgcaacatcgcgcggtactgcgggagcttctgccagcacaaggactgggagcgccaccaccggctctgcggccagaacctgcacggccagtccccgcacgggcagggccgccccctgctgcccgtggggcggggcagctccgcccgcagcgccgactgctccgtgcccagccccgccctcgacaagacctccgccaccacgagccgctccagcacccccgcgtccgtcaccgccatcgacaccaacgggctgtgaggactagtccctgttcccagagcccacttttttttctttttttgaaataaaatagcctgtctttcagatctaaaaaaaaaaaaaaaaaaaaaaaaaaaaaaaaaaaaaaaaaaaaaaaaaaaaaaaaaaaaaaaaaaaaaaaaaaaaaaaaaaaaaaaaaaaaaaaaaaaagaatt

SEQ ID NO: 1367 - RNA, 2731 nt, synthetic construct
  misc_feature 1..2731: note = Artificial____RUNX1(1-241)_I_RUNX1T1b(22-604) mRNA opt1
  source 1..2731: mol_type = other RNA
aggagagtcccgcagtcggcgtccagcggctctgcttgttcgtgtgtgtgtcgttgcaggccttattcaagcttaccatgcgcatccccgtggacgccagcacctcccggcgcttcaccccgcccagcacggccctgtcccccggcaagatgagcgaggcgctccccctgggggccccggacgccggcgccgccctggcggggaagctccggtccggcgaccgcagcatggtcgaggtgctggccgaccaccccggggagctggtgcggaccgactcccccaacttcctctgcagcgtcctgcccacccactggcgctgcaacaagaccctgccgatcgccttcaaggtggtggccctcggcgacgtccccgacggcacgctggtgaccgtgatggcggggaacgacgagaactactccgccgagctgcggaacgccaccgccgccatgaagaaccaggtcgcgcgcttcaacgacctccggttcgtgggccgcagcgggcggggcaagtccttcaccctgacgatcaccgtgttcaccaacccgccccaggtcgccacctaccaccgcgccatcaagatcacggtggacgggccccgggagccccgccggcaccgccagaagctggacgaccagaccaagcccggcagcctctccttcagcgagcggctgtccgagctggagcagctccgccggaccgccatgcgcgtgagcccccaccacccggcccccacccccaacccccgggcgtccctgaaccacagcacggccttcaacccgcagccccagtcccagatgcagatcgggcccgagaagcgggtgccggcgatgcccggcagccccgtggaggtcaagatccagtcccgcagctccccgcccaccatgccgcccctgccgcccatcaaccccgggggcccccggcccgtgagcttcacccccacggccctgtccaacgggatcaaccactccccgcccaccctcaacggcgcccccagcccgccccagcgcttcagcaacggccccgcctccagcacctccagcgccctgaccaaccagcagctgcccgcgacgtgcggggcccggcagctctccaagctgaagcgcttcctgaccaccctccagcagttcggcaacgacatcagccccgagatcggggagaaggtgcggaccctggtcctggccctcgtgaactccacggtgaccatcgaggagttccactgcaagctgcaggaggccaccaacttccccctgcgccccttcgtcatccccttcctcaaggcgaacctgccgctgctccagcgggagctgctgcactgcgcccgcgccgccaagcagacccccagccagtacctcgcccagcacgagcacctcctgctgaacacgtccatcgcgagccccgccgacagctccgagctgctgatggaggtgcacggcaacgggaagcggcccagcccggagcgccgggaggagaactccttcgaccgcgacaccatcgcccccgagcccccggccaagcgggtgtgcaccatcagccccgcgccccgccactcccccgccctcaccgtcccgctgatgaaccccggcggccagttccaccccacgcccccgcccctgcagcactacaccctcgaggacatcgccaccagccacctgtaccgggagcccaacaagatgctggagcaccgcgaggtgcgggaccgccaccactccctcgggctgaacggcgggtaccaggacgagctggtggaccaccggctcaccgagcgcgagtgggccgacgagtggaagcacctggaccacgccctgaactgcatcatggagatggtcgagaagacgcgccggagcatggccgtgctccgccggtgccaggagtccgaccgcgaggagctgaactactggaagcggcgctacaacgagaacaccgagctgcggaagaccggcaccgagctcgtgagccgccagcactcccccggcagcgcggactccctgagcaacgactcccagcgggagttcaacagccgcccggggacgggctacgtccccgtggagttctggaagaagaccgaggaggccgtgaacaaggtcaagatccaggccatgtccgaggtgcagaaggccgtggccgaggcggagcagaaggccttcgaggtcatcgccaccgagcgggcccgcatggagcagaccatcgcggacgtgaagcggcaggccgccgaggacgccttcctggtcatcaacgagcaggaggagagcacggagaactgctggaactgcgggcgcaaggcctccgagacctgcagcggctgcaacatcgcgcggtactgcgggagcttctgccagcacaaggactgggagcgccaccaccggctctgcggccagaacctgcacggccagtccccgcacgggcagggccgccccctgctgcccgtggggcggggcagctccgcccgcagcgccgactgctccgtgcccagccccgccctcgacaagacctccgccaccacgagccgctccagcacccccgcgtccgtcaccgccatcgacaccaacgggctgtgaggactagtccctgttcccagagcccacttttttttctttttttgaaataaaatagcctgtctttcagatctaaaaaaaaaaaaaaaaaaaaaaaaaaaaaaaaaaaaaaaaaaaaaaaaaaaaaaaaaaaaaaaaaaaaaaaaaaaaaaaaaaaaaaaaaaaaaaaaaaaagaatt

SEQ ID NO: 1368 - RNA, 1615 nt, synthetic construct
  misc_feature 1..1615: note = Homo sapiens__Q01196-1__RUNX1(K83E_R174Q) mRNA opt1
  source 1..1615: mol_type = other RNA
aggagagtcccgcagtcggcgtccagcggctctgcttgttcgtgtgtgtgtcgttgcaggccttattcaagcttaccatgcgcatccccgtggacgccagcacctcccggcgcttcaccccgcccagcacggccctgtcccccggcaagatgagcgaggcgctccccctgggggccccggacgccggcgccgccctggcggggaagctccggtccggcgaccgcagcatggtcgaggtgctggccgaccaccccggggagctggtgcggaccgactcccccaacttcctctgcagcgtcctgcccacccactggcgctgcaacgagaccctgccgatcgccttcaaggtggtggccctcggcgacgtccccgacggcacgctggtgaccgtgatggcggggaacgacgagaactactccgccgagctgcggaacgccaccgccgccatgaagaaccaggtcgcgcgcttcaacgacctccggttcgtgggccgcagcgggcggggcaagtccttcaccctgacgatcaccgtgttcaccaacccgccccaggtcgccacctaccaccgcgccatcaagatcacggtggacgggccccaggagccccggcgccaccggcagaagctggacgaccagaccaagcccggcagcctctccttcagcgagcgcctgtccgagctggagcagctccggcgcaccgccatgcgggtgagcccccaccacccggcccccacccccaacccccgcgcgtccctgaaccacagcacggccttcaacccgcagccccagtcccagatgcaggacacccggcagatccagcccagcccgccctggagctacgaccagtcctaccagtacctgggcagcatcgcctcccccagcgtccaccccgccacccccatctccccggggcgcgccagcggcatgaccacgctctccgcggagctgagctcccgcctgagcaccgcccccgacctcaccgccttctccgacccccggcagttcccggccctgcccagcatctccgacccccgcatgcactaccccggggccttcacctacagcccgacgcccgtgacctccggcatcggcatcgggatgagcgcgatgggctccgccacccggtaccacacctacctgcccccgccctaccccgggagctcccaggcccagggcgggcccttccaggccagcagcccctcctaccacctctactacggcgcgagcgccggctcctaccagttcagcatggtcgggggcgagcgctccccgccccggatcctgccgccctgcacgaacgccagcaccgggtccgccctgctcaaccccagcctgcccaaccagtccgacgtggtggaggccgagggcagccactccaacagccccaccaacatggcgccctccgcccgcctggaggaggccgtgtggcggccgtactgaggactagtccctgttcccagagcccacttttttttctttttttgaaataaaatagcctgtctttcagatctaaaaaaaaaaaaaaaaaaaaaaaaaaaaaaaaaaaaaaaaaaaaaaaaaaaaaaaaaaaaaaaaaaaaaaaaaaaaaaaaaaaaaaaaaaaaaaaaaaaagaatt

SEQ ID NO: 1369 - RNA, 2089 nt, synthetic construct
  misc_feature 1..2089: note = Homo sapiens____CBFbeta(1-165)_SMMHC(1527-1972) mRNA opt1
  source 1..2089: mol_type = other RNA
aggagagtcccgcagtcggcgtccagcggctctgcttgttcgtgtgtgtgtcgttgcaggccttattcaagcttaccatgccccgcgtggtcccggaccagcggagcaagttcgagaacgaggagttcttccgcaagctgtcccgggagtgcgagatcaagtacaccggcttccgcgaccggccccacgaggagcgccaggcccggttccagaacgcctgccgcgacgggcggagcgagatcgcgttcgtggccaccggcacgaacctctccctgcagttcttccccgccagctggcagggggagcagcgccagaccccctcccgggagtacgtggacctggagcgcgaggccggcaaggtctacctcaaggccccgatgatcctgaacggggtgtgcgtgatctggaagggctggatcgacctgcagcggctcgacggcatggggtgcctggagttcgacgaggagcgcgcgcagcaggaggacgccctggcccagcaggccttcgaggaggcgcggcgccggacccgcgagttcgaggaccgggaccgcagccaccgggaggagatggaggtccacgagctcgagaagtccaagcgcgccctggagacccagatggaggagatgaagacgcagctggaggagctcgaggacgagctgcaggccaccgaggacgccaagctgcgcctcgaggtgaacatgcaggccctgaagggccagttcgagcgggacctgcaggcgcgcgacgagcagaacgaggagaagcggcgccagctccagcggcagctgcacgagtacgagaccgagctggaggacgagcgcaagcagcgggccctcgccgccgccgcgaagaagaagctggagggggacctgaaggacctcgagctgcaggccgacagcgccatcaagggccgcgaggaggccatcaagcagctgcggaagctccaggcccagatgaaggacttccagcgcgagctggaggacgcgcgggcctcccgcgacgagatcttcgccaccgccaaggagaacgagaagaaggccaagagcctggaggcggacctcatgcagctgcaggaggacctggccgccgccgagcgggcgcgcaagcaggccgacctcgagaaggaggagctggccgaggagctggcctccagcctctccgggcggaacgccctgcaggacgagaagcgccggctggaggcgcgcatcgcccagctcgaggaggagctggaggaggagcagggcaacatggaggccatgagcgaccgggtgcgcaaggccacgcagcaggccgagcagctgtccaacgagctcgcgaccgagcgcagcaccgcccagaagaacgagtccgcccggcagcagctggagcgccagaacaaggagctgcggagcaagctccacgagatggagggcgccgtcaagtccaagttcaagagcaccatcgccgcgctggaggccaagatcgcccagctggaggagcaggtcgagcaggaggcccgcgagaagcaggcggccaccaagagcctgaagcagaaggacaagaagctcaaggagatcctgctccaggtggaggacgagcggaagatggccgagcagtacaaggagcaggccgagaaggggaacgcccgcgtgaagcagctgaagcggcagctggaggaggcggaggaggagtcccagcgcatcaacgccaaccggcgcaagctgcagcgggagctcgacgaggccacggagagcaacgaggccatgggccgcgaggtgaacgccctgaagtccaagctgcggcgcgggaacgagaccagcttcgtgccctcccggcgcagcggcggccggcgcgtcatcgagaacgcggacgggtccgaggaggagaccgacacgcgggacgccgacttcaacggcaccaaggccagcgagtgaggactagtccctgttcccagagcccacttttttttctttttttgaaataaaatagcctgtctttcagatctaaaaaaaaaaaaaaaaaaaaaaaaaaaaaaaaaaaaaaaaaaaaaaaaaaaaaaaaaaaaaaaaaaaaaaaaaaaaaaaaaaaaaaaaaaaaaaaaaaaagaatt

SEQ ID NO: 1370 - RNA, 1804 nt, synthetic construct
  misc_feature 1..1804: note = Artificial____CBFbeta(1-165)_SMMHC(1527-1877) mRNA opt1
  source 1..1804: mol_type = other RNA
aggagagtcccgcagtcggcgtccagcggctctgcttgttcgtgtgtgtgtcgttgcaggccttattcaagcttaccatgccccgcgtggtgccggaccagcggagcaagttcgagaacgaggagttcttccgcaagctgtcccgggagtgcgagatcaagtacacgggcttccgcgaccggccccacgaggagcgccaggcccggttccagaacgcctgccgcgacgggcggagcgagatcgcgttcgtggccaccggcacgaacctgtccctgcagttcttccccgccagctggcagggggagcagcgccagaccccctcccgggagtacgtggacctggagcgcgaggccggcaaggtctacctcaaggccccgatgatcctgaacggggtgtgcgtgatctggaagggctggatcgacctgcagcggctcgacggcatggggtgcctggagttcgacgaggagcgcgcgcagcaggaggacgccctggcccagcaggccttcgaggaggcgcggcgccggacccgcgagttcgaggaccgggaccgcagccaccgggaggagatggaggtccacgagctcgagaagtccaagcgcgccctggagacccagatggaggagatgaagacgcagctggaggagctcgaggacgagctgcaggccaccgaggacgccaagctgcgcctcgaggtgaacatgcaggccctgaagggccagttcgagcgggacctgcaggcgcgcgacgagcagaacgaggagaagcggcgccagctccagcggcagctgcacgagtacgagaccgagctggaggacgagcgcaagcagcgggccctcgccgccgccgcgaagaagaagctggagggggacctgaaggacctcgagctgcaggccgacagcgccatcaagggccgcgaggaggccatcaagcagctgcggaagctccaggcccagatgaaggacttccagcgcgagctggaggacgcgcgggcctcccgcgacgagatcttcgccaccgccaaggagaacgagaagaaggccaagagcctggaggcggacctcatgcagctgcaggaggacctggccgccgccgagcgggcgcgcaagcaggccgacctcgagaaggaggagctggccgaggagctggcctccagcctctccgggcggaacgccctgcaggacgagaagcgccggctggaggcgcgcatcgcccagctcgaggaggagctggaggaggagcagggcaacatggaggccatgagcgaccgggtgcgcaaggccacgcagcaggccgagcagctgtccaacgagctcgcgaccgagcgcagcaccgcccagaagaacgagtccgcccggcagcagctggagcgccagaacaaggagctgcggagcaagctccacgagatggagggcgccgtcaagtccaagttcaagagcaccatcgccgcgctggaggccaagatcgcccagctggaggagcaggtcgagcaggaggcccgcgagaagcaggcggccaccaagagcctgaagcagaaggacaagaagctcaaggagatcctgctccaggtggaggacgagcggaagatggccgagcagtacaaggagcaggccgagaaggggaacgcctgaggactagtccctgttcccagagcccacttttttttctttttttgaaataaaatagcctgtctttcagatctaaaaaaaaaaaaaaaaaaaaaaaaaaaaaaaaaaaaaaaaaaaaaaaaaaaaaaaaaaaaaaaaaaaaaaaaaaaaaaaaaaaaaaaaaaaaaaaaaaaagaatt

SEQ ID NO: 1371 - RNA, 865 nt, synthetic construct
  misc_feature 1..865: note = Artificial____CBFbeta(1-165)_Linker_Lifeact mRNA opt1
  source 1..865: mol_type = other RNA
aggagagtcccgcagtcggcgtccagcggctctgcttgttcgtgtgtgtgtcgttgcaggccttattcaagcttaccatgccccgcgtggtccccgaccagcggagcaagttcgagaacgaggagttcttccgcaagctgtcccgggagtgcgagatcaagtacaccggcttccgcgaccggccccacgaggagcgccaggcccggttccagaacgcctgccgcgacgggcggagcgagatcgcgttcgtggccaccggcacgaacctctccctgcagttcttccccgccagctggcagggggagcagcgccagaccccctcccgggagtacgtggacctggagcgcgaggccggcaaggtctacctcaaggccccgatgatcctgaacggggtgtgcgtgatctggaagggctggatcgacctgcagcggctcgacggcatggggtgcctggagttcgacgaggagcgcgcgcagcaggaggacgccctggcccagcaggccttcgaggaggcgcggcgccggacccgcgagttcgaggaccgggaccgcagccaccgggaggagatggagggcgggtccggcgggagcggcggctccgggggcagcgggggcggcggggtcgccgacctcatcaagaagttcgagtccatcagcaaggaggagggcgacccgcccgtggccacctgaggactagtccctgttcccagagcccacttttttttctttttttgaaataaaatagcctgtctttcagatctaaaaaaaaaaaaaaaaaaaaaaaaaaaaaaaaaaaaaaaaaaaaaaaaaaaaaaaaaaaaaaaaaaaaaaaaaaaaaaaaaaaaaaaaaaaaaaaaaaaagaatt

SEQ ID NO: 1372 - RNA, 832 nt, synthetic construct
  misc_feature 1..832: note = Artificial____CBFbeta(1-165)_HIF1alpha(549-575) mRNA opt1
  source 1..832: mol_type = other RNA
aggagagtcccgcagtcggcgtccagcggctctgcttgttcgtgtgtgtgtcgttgcaggccttattcaagcttaccatgccccgcgtggtcccggaccagcggagcaagttcgagaacgaggagttcttccgcaagctgtcccgggagtgcgagatcaagtacaccggcttccgcgaccggccccacgaggagcgccaggcccggttccagaacgcctgccgcgacgggcggagcgagatcgcgttcgtggccaccggcacgaacctctccctgcagttcttccccgccagctggcagggggagcagcgccagaccccctcccgggagtacgtggacctggagcgcgaggccggcaaggtctacctcaaggccccgatgatcctgaacggggtgtgcgtgatctggaagggctggatcgacctgcagcggctcgacggcatggggtgcctggagttcgacgaggagcgcgcgcagcaggaggacgccctggcccagcaggccttcgaggaggcgcggcgccggacccgcgagttcgaggaccgggaccgcagccaccgggaggagatggagcccttctccacccaggacacggacctcgacctggagatgctggccccctacatccccatggacgacgacttccagctccgctgaggactagtccctgttcccagagcccacttttttttctttttttgaaataaaatagcctgtctttcagatctaaaaaaaaaaaaaaaaaaaaaaaaaaaaaaaaaaaaaaaaaaaaaaaaaaaaaaaaaaaaaaaaaaaaaaaaaaaaaaaaaaaaaaaaaaaaaaaaaaaagaatt

SEQ ID NO: 1373 - RNA, 877 nt, synthetic construct
  misc_feature 1..877: note Artificial____CBFbeta(1-165)_Linker_HIF1alpha(549-575) mRNA opt1
  source 1..877: mol_type = other RNA
aggagagtcccgcagtcggcgtccagcggctctgcttgttcgtgtgtgtgtcgttgcaggccttattcaagcttaccatgccccgcgtggtcccggaccagcggagcaagttcgagaacgaggagttcttccgcaagctgtcccgggagtgcgagatcaagtacaccggcttccgcgaccggccccacgaggagcgccaggcccggttccagaacgcctgccgcgacgggcggagcgagatcgcgttcgtggccaccggcacgaacctctccctgcagttcttccccgccagctggcagggggagcagcgccagaccccctcccgggagtacgtggacctggagcgcgaggccggcaaggtctacctcaaggccccgatgatcctgaacggggtgtgcgtgatctggaagggctggatcgacctgcagcggctcgacggcatggggtgcctggagttcgacgaggagcgcgcgcagcaggaggacgccctggcccagcaggccttcgaggaggcgcggcgccggacccgcgagttcgaggaccgggaccgcagccaccgggaggagatggagggcgggtccggcgggagcggcggctccgggggcagcgggggcggccccttctccacccaggacacggacctcgacctggagatgctggccccctacatccccatggacgacgacttccagctccgctgaggactagtccctgttcccagagcccacttttttttctttttttgaaataaaatagcctgtctttcagatctaaaaaaaaaaaaaaaaaaaaaaaaaaaaaaaaaaaaaaaaaaaaaaaaaaaaaaaaaaaaaaaaaaaaaaaaaaaaaaaaaaaaaaaaaaaaaaaaaaaagaatt

SEQ ID NO: 1374 - RNA, 2512 nt, synthetic construct
  misc_feature 1..2512: note = Artificial____RUNX1(1-177)_N_RUNX1T1a(31-604) mRNA opt1
  source 1..2512: mol_type = other RNA
aggagagtcccgcagtcggcgtccagcggctctgcttgttcgtgtgtgtgtcgttgcaggccttattcaagcttaccatgcgcatccccgtggacgccagcacctcccggcgcttcaccccgcccagcacggccctgtcccccggcaagatgagcgaggcgctccccctgggggccccggacgccggcgccgccctggcggggaagctccggtccggcgaccgcagcatggtcgaggtgctggccgaccaccccggggagctggtgcggaccgactcccccaacttcctctgcagcgtcctgcccacccactggcgctgcaacaagaccctgccgatcgccttcaaggtggtggccctcggcgacgtccccgacggcacgctggtgaccgtgatggcggggaacgacgagaactactccgccgagctgcggaacgccaccgccgccatgaagaaccaggtcgcgcgcttcaacgacctccggttcgtgggccgcagcgggcggggcaagtccttcaccctgacgatcaccgtgttcaccaaccccccccaggtcgccacctaccaccgcgccatcaagatcacggtggacgggccgcgggagccccgcaaccggaccgagaagcacagcaccatgcccgactcccccgtggacgtcaagacccagagccgcctgacgccgcccaccatgccccccccgcccaccacccagggcgccccccggacgtccagcttcacccccaccaccctcacgaacggcacctcccacagcccgaccgccctgaacggggcgccctccccccccaacggcttcagcaacgggccgagctccagctccagctccagcctggccaaccagcagctcccccccgcctgcggcgcccgccagctgtccaagctgaagcggttcctcaccacgctgcagcagttcggcaacgacatcagcccggagatcggggagcgcgtgcggaccctggtgctcggcctggtcaactccaccctgaccatcgaggagttccacagcaagctccaggaggccacgaacttccccctgcgccccttcgtgatccccttcctgaaggcgaacctcccgctgctgcagcgcgagctcctgcactgcgcccggctggccaagcagaaccccgcccagtacctcgcccagcacgagcagctgctgctcgacgcgtccaccaccagccccgtggactccagcgagctgctgctcgacgtcaacgagaacgggaagcgccggacccccgaccgcacgaaggagaacggcttcgaccgggagccgctgcactccgagcaccccagcaagcgcccctgcaccatctcccccgggcagcggtacagcccgaacaacggcctgtcctaccagcccaacggcctcccccaccccaccccgccccccccccagcactaccgcctggacgacatggccatcgcccaccactaccgggacagctaccgccacccgagccaccgggacctgcgcgaccggaaccgccccatggggctgcacggcacccggcaggaggagatgatcgaccaccgcctcaccgaccgggagtgggccgaggagtggaagcacctggaccacctgctcaactgcatcatggacatggtggagaagacgcgccggtccctgaccgtgctgcgccgctgccaggaggcggaccgggaggagctcaactactggatccgccggtacagcgacgccgaggacctgaagaaggggggcgggtccagctccagccactcccgccagcagagccccgtcaaccccgacccggtggccctggacgcccaccgggagttcctccaccgccccgcctccggctacgtccccgaggagatctggaagaaggcggaggaggccgtgaacgaggtgaagcggcaggccatgaccgagctgcagaaggccgtcagcgaggccgagcgcaaggcgcacgacatgatcaccacggagcgggccaagatggagcgcaccgtggccgaggccaagcggcaggccgcggaggacgccctggccgtgatcaaccagcaggaggactccagcgagtcctgctggaactgcggccgcaaggccagcgagacctgctccgggtgcaacaccgcgcggtactgcggcagcttctgccagcacaaggactgggagaagcaccaccacatctgcgggcagacgctccaggcccagcagcagggcgacaccccggccgtctccagcagcgtgacccccaactccggggccggcagccccatggacacccccccggccgcgacgccccgctccaccacccccggcacccccagcacgatcgagaccaccccgcggtgaggactagtccctgttcccagagcccacttttttttctttttttgaaataaaatagcctgtctttcagatctaaaaaaaaaaaaaaaaaaaaaaaaaaaaaaaaaaaaaaaaaaaaaaaaaaaaaaaaaaaaaaaaaaaaaaaaaaaaaaaaaaaaaaaaaaaaaaaaaaaagaatt

SEQ ID NO: 1375 - RNA, 1027 nt, synthetic construct
  misc_feature 1..1027: note = Artificial____RUNX1(1-241)_RUNX1T1b(short) mRNA opt1
  source 1..1027: mol_type = other RNA
aggagagtcccgcagtcggcgtccagcggctctgcttgttcgtgtgtgtgtcgttgcaggccttattcaagcttaccatgcgcatccccgtggacgccagcacctcccggcgcttcaccccgcccagcacggccctgtcccccggcaagatgagcgaggcgctccccctgggggccccggacgccggcgccgccctggcggggaagctccggtccggcgaccgcagcatggtcgaggtgctggccgaccaccccggggagctggtgcggaccgactcccccaacttcctctgcagcgtcctgcccacccactggcgctgcaacaagaccctgccgatcgccttcaaggtggtggccctcggcgacgtccccgacggcacgctggtgaccgtgatggcggggaacgacgagaactactccgccgagctgcggaacgccaccgccgccatgaagaaccaggtcgcgcgcttcaacgacctccggttcgtgggccgcagcgggcggggcaagtccttcaccctgacgatcaccgtgttcaccaacccgccccaggtcgccacctaccaccgcgccatcaagatcacggtggacgggccccgggagccccgccggcaccgccagaagctggacgaccagaccaagcccggcagcctctccttcagcgagcggctgtccgagctggagcagctccgccggaccgccatgcgcgtgagcccccaccacccggcccccacccccaacccccgggcgtccctgaaccacagcacggccttcaacccgcagccccagtcccagatgcaggaggtcggcttctgccacgtggcccaggtggggctgaagctcctgggctgaggactagtccctgttcccagagcccacttttttttctttttttgaaataaaatagcctgtctttcagatctaaaaaaaaaaaaaaaaaaaaaaaaaaaaaaaaaaaaaaaaaaaaaaaaaaaaaaaaaaaaaaaaaaaaaaaaaaaaaaaaaaaaaaaaaaaaaaaaaaaagaatt

SEQ ID NO: 1376 - RNA, 2731 nt, synthetic construct
  misc_feature 1..2731: note = Artificial____RUNX1(1-241)_V_RUNX1T1b(22-604) mRNA opt1
  source 1..2731: mol_type = other RNA
aggagagtcccgcagtcggcgtccagcggctctgcttgttcgtgtgtgtgtcgttgcaggccttattcaagcttaccatgcgcatccccgtggacgccagcacctcccggcgcttcaccccgcccagcacggccctgtcccccggcaagatgagcgaggcgctccccctgggggccccggacgccggcgccgccctggcggggaagctccggtccggcgaccgcagcatggtcgaggtgctggccgaccaccccggggagctggtgcggaccgactcccccaacttcctctgcagcgtcctgcccacccactggcgctgcaacaagaccctgccgatcgccttcaaggtggtggccctcggcgacgtccccgacggcacgctggtgaccgtgatggcggggaacgacgagaactactccgccgagctgcggaacgccaccgccgccatgaagaaccaggtcgcgcgcttcaacgacctccggttcgtgggccgcagcgggcggggcaagtccttcaccctgacgatcaccgtgttcaccaacccgccccaggtcgccacctaccaccgcgccatcaagatcacggtggacgggccccgggagccccgccggcaccgccagaagctggacgaccagaccaagcccggcagcctctccttcagcgagcggctgtccgagctggagcagctccgccggaccgccatgcgcgtgagcccccaccacccggcccccacccccaacccccgggcgtccctgaaccacagcacggccttcaacccgcagccccagtcccagatgcaggtcggccccgagaagcgcgtgcccgccatgccggggagccccgtggaggtcaagatccagagccgctccagcccgcccaccatgccgcccctgcccccgatcaaccccggcgggccccggcccgtgtccttcacccccaccgccctcagcaacggcatcaaccactccccgcccacgctgaacggcgcccccagcccgccccagcgcttctccaacgggcccgcgagctccaccagctccgccctgaccaaccagcagctccccgcgacctgcggcgcccggcagctgagcaagctgaagcgcttcctcacgaccctgcagcagttcgggaacgacatctcccccgagatcggcgagaaggtgcggaccctggtcctcgccctggtgaacagcaccgtgacgatcgaggagttccactgcaagctgcaggaggccaccaacttccccctccgccccttcgtcatccccttcctgaaggccaacctgccgctcctgcagcgggagctgctccactgcgcccgcgccgcgaagcagaccccctcccagtacctggcccagcacgagcacctcctgctgaacaccagcatcgcctcccccgccgacagctccgagctgctcatggaggtgcacgggaacggcaagcggcccagcccggagcgccgggaggagaacagcttcgaccgcgacacgatcgcccccgagccgcccgcgaagcgggtctgcaccatctcccccgcgccccgccacagccccgccctgaccgtgccgctgatgaaccccggcgggcagttccaccccacgcccccgcccctgcagcactacaccctcgaggacatcgccacctcccacctgtaccgggagcccaacaagatgctggagcaccgcgaggtgcgggaccgccaccacagcctcggcctgaacgggggctaccaggacgagctggtcgaccaccggctcaccgagcgcgagtgggccgacgagtggaagcacctggaccacgccctgaactgcatcatggagatggtggagaagacccgccggtccatggccgtgctccgccggtgccaggagagcgaccgcgaggagctgaactactggaagcggcgctacaacgagaacaccgagctgcggaagacggggaccgagctcgtctcccgccagcacagccccggctccgccgacagcctgtccaacgacagccagcgggagttcaactcccgcccgggcaccgggtacgtgcccgtggagttctggaagaagaccgaggaggccgtcaacaaggtgaagatccaggccatgagcgaggtgcagaaggcggtcgccgaggccgagcagaaggccttcgaggtgatcgcgacggagcgggcccgcatggagcagaccatcgccgacgtgaagcggcaggccgccgaggacgcgttcctggtcatcaacgagcaggaggagtccaccgagaactgctggaactgcggccgcaaggccagcgagacctgctccgggtgcaacatcgcccggtactgcggcagcttctgccagcacaaggactgggagcgccaccaccggctctgcgggcagaacctgcacggccagagcccccacggccaggggcgccccctgctcccggtgggccgggggtccagcgcccgctccgccgactgcagcgtgccctcccccgcgctggacaagacgagcgccaccacctcccggagctccacccccgccagcgtcacggccatcgacaccaacggcctgtgaggactagtccctgttcccagagcccacttttttttctttttttgaaataaaatagcctgtctttcagatctaaaaaaaaaaaaaaaaaaaaaaaaaaaaaaaaaaaaaaaaaaaaaaaaaaaaaaaaaaaaaaaaaaaaaaaaaaaaaaaaaaaaaaaaaaaaaaaaaaaagaatt

SEQ ID NO: 1377 - RNA, 2731 nt, synthetic construct
  misc_feature 1..2731: note = Artificial____RUNX1(1-241)_I_RUNX1T1b(22-604) mRNA opt1
  source 1..2731: mol_type = other RNA
aggagagtcccgcagtcggcgtccagcggctctgcttgttcgtgtgtgtgtcgttgcaggccttattcaagcttaccatgcgcatccccgtggacgccagcacctcccggcgcttcaccccgcccagcacggccctgtcccccggcaagatgagcgaggcgctccccctgggggccccggacgccggcgccgccctggcggggaagctccggtccggcgaccgcagcatggtcgaggtgctggccgaccaccccggggagctggtgcggaccgactcccccaacttcctctgcagcgtcctgcccacccactggcgctgcaacaagaccctgccgatcgccttcaaggtggtggccctcggcgacgtccccgacggcacgctggtgaccgtgatggcggggaacgacgagaactactccgccgagctgcggaacgccaccgccgccatgaagaaccaggtcgcgcgcttcaacgacctccggttcgtgggccgcagcgggcggggcaagtccttcaccctgacgatcaccgtgttcaccaacccgccccaggtcgccacctaccaccgcgccatcaagatcacggtggacgggccccgggagccccgccggcaccgccagaagctggacgaccagaccaagcccggcagcctctccttcagcgagcggctgtccgagctggagcagctccgccggaccgccatgcgcgtgagcccccaccacccggcccccacccccaacccccgggcgtccctgaaccacagcacggccttcaacccgcagccccagtcccagatgcagatcggccccgagaagcgcgtccccgccatgccggggagccccgtggaggtgaagatccagagccgctccagcccgcccaccatgccgcccctgcccccgatcaaccccggcgggccccggcccgtctccttcacccccaccgccctcagcaacggcatcaaccactccccgcccacgctgaacggcgcccccagcccgccccagcgcttctccaacgggcccgcgagctccaccagctccgccctgaccaaccagcagctccccgcgacctgcggcgcccggcagctgagcaagctgaagcgcttcctcacgaccctgcagcagttcgggaacgacatctcccccgagatcggcgagaaggtgcggaccctggtgctcgccctggtcaacagcaccgtgacgatcgaggagttccactgcaagctgcaggaggccaccaacttccccctccgccccttcgtgatccccttcctgaaggccaacctgccgctcctgcagcgggagctgctccactgcgcccgcgccgcgaagcagaccccctcccagtacctggcccagcacgagcacctcctgctgaacaccagcatcgcctcccccgccgacagctccgagctgctcatggaggtccacgggaacggcaagcggcccagcccggagcgccgggaggagaacagcttcgaccgcgacacgatcgcccccgagccgcccgcgaagcgggtgtgcaccatctcccccgcgccccgccacagccccgccctgaccgtcccgctgatgaaccccggcgggcagttccaccccacgcccccgcccctgcagcactacaccctcgaggacatcgccacctcccacctgtaccgggagcccaacaagatgctggagcaccgcgaggtgcgggaccgccaccacagcctcggcctgaacgggggctaccaggacgagctggtggaccaccggctcaccgagcgcgagtgggccgacgagtggaagcacctggaccacgccctgaactgcatcatggagatggtcgagaagacccgccggtccatggccgtgctccgccggtgccaggagagcgaccgcgaggagctgaactactggaagcggcgctacaacgagaacaccgagctgcggaagacggggaccgagctcgtgtcccgccagcacagccccggctccgccgacagcctgtccaacgacagccagcgggagttcaactcccgcccgggcaccgggtacgtccccgtggagttctggaagaagaccgaggaggccgtgaacaaggtcaagatccaggccatgagcgaggtgcagaaggcggtggccgaggccgagcagaaggccttcgaggtcatcgcgacggagcgggcccgcatggagcagaccatcgccgacgtgaagcggcaggccgccgaggacgcgttcctggtgatcaacgagcaggaggagtccaccgagaactgctggaactgcggccgcaaggccagcgagacctgctccgggtgcaacatcgcccggtactgcggcagcttctgccagcacaaggactgggagcgccaccaccggctctgcgggcagaacctgcacggccagagcccccacggccaggggcgccccctgctcccggtcggccgggggtccagcgcccgctccgccgactgcagcgtgccctcccccgcgctggacaagacgagcgccaccacctcccggagctccacccccgccagcgtgacggccatcgacaccaacggcctgtgaggactagtccctgttcccagagcccacttttttttctttttttgaaataaaatagcctgtctttcagatctaaaaaaaaaaaaaaaaaaaaaaaaaaaaaaaaaaaaaaaaaaaaaaaaaaaaaaaaaaaaaaaaaaaaaaaaaaaaaaaaaaaaaaaaaaaaaaaaaaaagaatt

SEQ ID NO: 1378 - RNA, 1615 nt, synthetic construct
  misc_feature 1..1615: note = Homo sapiens__Q01196-1__RUNX1(K83E_R174Q) mRNA opt3
  source 1..1615: mol_type = other RNA
aggagagtcccgcagtcggcgtccagcggctctgcttgttcgtgtgtgtgtcgttgcaggccttattcaagcttaccatgagaatccccgtggatgccagcaccagcagaagattcacccctcctagcaccgctctgagccctggcaagatgtctgaagctctgcctctgggagcacctgatgctggtgcagctctggccggaaaactgagaagcggcgacagatccatggtggaagtgctggctgatcaccccggcgaacttgtgcggacagacagccctaatttcctgtgcagcgtgctgcctacacactggcggtgcaatgagacactgcctatcgccttcaaggtggtggccctgggagatgtgcctgatggcacactggttacagtgatggccggcaacgacgagaactacagcgccgagctgagaaatgccaccgccgccatgaagaaccaggtggccagattcaacgacctgagattcgtgggcagaagcggcaggggcaagagctttaccctgaccatcaccgtgttcaccaatcctccacaggtggcaacctaccaccgggccatcaagatcacagtggacggccctcaagagcccagacggcacagacagaaactggacgaccagaccaagcctggcagcctgagctttagcgagagactgagcgagctggaacagctgagaagaaccgccatgcgggtgtccccacatcaccctgctcctacacctaatcctcgggccagcctgaatcacagcaccgcctttaatccccagcctcagagccagatgcaggacaccagacagattcagccttctccaccttggagctacgaccagagctaccagtacctgggctctatcgcctctcctagcgtgcaccctgccacacctattagtcctggcagagccagcggcatgacaacactgtctgccgagctgtccagcagactgagcacagcccctgatctgaccgccttcagcgaccctagacagttccctgctctgcccagcatctctgaccccagaatgcattaccctggcgccttcacatacagccccacacctgtgacaagcggcatcggcattggcatgtctgccatgggaagcgccaccagataccacacctacctgcctccaccttatcctggcagctctcaggctcaaggcggcccttttcaggccagctctccttcctaccacctgtactatggcgccagcgccggctcctaccagttttctatggttggaggcgagcggagccctcctagaatcctgcctccttgtaccaacgccagcacaggatctgccctgctgaatcccagcctgcctaatcagagcgacgtggtggaagccgagggcagccatagcaacagccctaccaatatggcccctagcgccagactggaagaggccgtttggaggccttactgaggactagtccctgttcccagagcccacttttttttctttttttgaaataaaatagcctgtctttcagatctaaaaaaaaaaaaaaaaaaaaaaaaaaaaaaaaaaaaaaaaaaaaaaaaaaaaaaaaaaaaaaaaaaaaaaaaaaaaaaaaaaaaaaaaaaaaaaaaaaaagaatt

SEQ ID NO: 1379 - RNA, 2089 nt, synthetic construct
  misc_feature 1..2089: note = Homo sapiens____CBFbeta(1-165)_SMMHC(1527-1972) mRNA opt3
  source 1..2089: mol_type = other RNA
aggagagtcccgcagtcggcgtccagcggctctgcttgttcgtgtgtgtgtcgttgcaggccttattcaagcttaccatgcctagagtggtgcccgaccagagaagcaagttcgagaacgaagagttctttcggaagctgagcagagagtgcgagatcaagtacaccggcttccgggacagaccccacgaagaaagacaggccagattccagaacgcctgcagagatggcagatccgagatcgcctttgtggccaccggcaccaatctgagcctgcagttctttccagcctcctggcagggcgagcagagacaaacacccagcagagaatacgtggacctggaacgcgaggccggcaaggtgtacctgaaggcccctatgatcctgaacggcgtgtgcgtgatctggaaaggctggatcgatctgcagcggctggatggcatgggctgcctggaatttgacgaggaaagagcccagcaagaggacgcccttgctcagcaggcctttgaggaagccagaaggcggaccagagagttcgaggacagagacagatcccaccgggaagagatggaagtgcacgagctggaaaagagcaagagagccctggaaacccagatggaagaaatgaagacccagctcgaggaactcgaggacgagctgcaggccacagaggatgccaagctgagactggaagtgaacatgcaggccctgaagggccagttcgagagagatctgcaggctagggacgagcagaacgaggaaaagcggagacagctgcagaggcagctgcacgagtacgagacagagctggaagatgagcggaagcagagagcactggccgctgccgccaagaagaaactggaaggcgacctgaaggatctggaactccaggccgacagcgccatcaagggaagagaagaggccatcaagcagctgcggaagctgcaagcccagatgaaggacttccagcgcgagttggaagatgccagagccagcagggatgagatcttcgccaccgccaaagagaacgagaagaaggccaagagcctggaagccgatctgatgcagctccaagaggatctggctgccgccgagagagccagaaaacaggccgacctggaaaaagaggaactggccgaagaactggccagcagcctgtctggcagaaacgctctgcaggacgagaagagaaggctggaagccaggatcgcccagttggaggaagaactcgaagaggaacagggcaacatggaagccatgagcgacagagtgcggaaggccacacagcaggctgagcagctgagcaatgagctggccaccgagagaagcacagcccagaagaatgagagcgccaggcagcagctcgagcggcagaacaaagagctgagaagcaaactgcacgaaatggaaggggccgtgaagtccaagttcaagagcacaatcgccgctctcgaggccaagatcgctcagctcgaagaacaggtggaacaagaggcccgggaaaagcaggccgccacaaagtctctgaagcagaaggacaagaagctgaaagaaatcctgctgcaggtcgaggatgagagaaagatggccgagcagtacaaagaacaggctgagaagggcaacgccagagtgaagcagctgaaacggcaactggaagaggccgaggaagagtcccagagaatcaacgccaacagacggaaactgcagagagagctggacgaagccaccgagtccaatgaggccatgggcagagaagtgaacgccctgaagtctaagctgcggagaggcaacgaaaccagcttcgtgcccagcagaagatccggcggcagaagagtgatcgagaacgccgatggctctgaggaagaaaccgacaccagagatgccgacttcaacggcacaaaggccagcgagtaaggactagtccctgttcccagagcccacttttttttctttttttgaaataaaatagcctgtctttcagatctaaaaaaaaaaaaaaaaaaaaaaaaaaaaaaaaaaaaaaaaaaaaaaaaaaaaaaaaaaaaaaaaaaaaaaaaaaaaaaaaaaaaaaaaaaaaaaaaaaaagaatt

SEQ ID NO: 1380 - RNA, 1804 nt, synthetic construct
  misc_feature 1..1804: note = Artificial____CBFbeta(1-165)_SMMHC(1527-1877) mRNA opt3
  source 1..1804: mol_type = other RNA
aggagagtcccgcagtcggcgtccagcggctctgcttgttcgtgtgtgtgtcgttgcaggccttattcaagcttaccatgcctagagtggtgcccgaccagagaagcaagttcgagaacgaagagttctttcggaagctgagcagagagtgcgagatcaagtacaccggcttccgggacagaccccacgaagaaagacaggccagattccagaacgcctgcagagatggcagatccgagatcgcctttgtggccaccggcaccaatctgagcctgcagttctttccagcctcctggcagggcgagcagagacaaacacccagcagagaatacgtggacctggaacgcgaggccggcaaggtgtacctgaaggcccctatgatcctgaacggcgtgtgcgtgatctggaaaggctggatcgatctgcagcggctggatggcatgggctgcctggaatttgacgaggaaagagcccagcaagaggacgcccttgctcagcaggcctttgaggaagccagaaggcggaccagagagttcgaggacagagacagatcccaccgggaagagatggaagtgcacgagctggaaaagagcaagagagccctggaaacccagatggaagaaatgaagacccagctcgaggaactcgaggacgagctgcaggccacagaggatgccaagctgagactggaagtgaacatgcaggccctgaagggccagttcgagagagatctgcaggctagggacgagcagaacgaggaaaagcggagacagctgcagaggcagctgcacgagtacgagacagagctggaagatgagcggaagcagagagcactggccgctgccgccaagaagaaactggaaggcgacctgaaggatctggaactccaggccgacagcgccatcaagggaagagaagaggccatcaagcagctgcggaagctgcaagcccagatgaaggacttccagcgcgagttggaagatgccagagccagcagggatgagatcttcgccaccgccaaagagaacgagaagaaggccaagagcctggaagccgatctgatgcagctccaagaggatctggctgccgccgagagagccagaaaacaggccgacctggaaaaagaggaactggccgaagaactggccagcagcctgtctggcagaaacgctctgcaggacgagaagagaaggctggaagccaggatcgcccagttggaggaagaactcgaagaggaacagggcaacatggaagccatgagcgacagagtgcggaaggccacacagcaggctgagcagctgagcaatgagctggccaccgagagaagcacagcccagaagaatgagagcgccaggcagcagctcgagcggcagaacaaagagctgagaagcaaactgcacgaaatggaaggggccgtgaagtccaagttcaagagcacaatcgccgctctcgaggccaagatcgctcagctcgaagaacaggtggaacaagaggcccgggaaaagcaggccgccacaaagtctctgaagcagaaggacaagaagctgaaagaaatcctgctgcaggtcgaggatgagagaaagatggccgagcagtacaaagaacaggctgagaagggcaacgcctgaggactagtccctgttcccagagcccacttttttttctttttttgaaataaaatagcctgtctttcagatctaaaaaaaaaaaaaaaaaaaaaaaaaaaaaaaaaaaaaaaaaaaaaaaaaaaaaaaaaaaaaaaaaaaaaaaaaaaaaaaaaaaaaaaaaaaaaaaaaaaagaatt

SEQ ID NO: 1381 - RNA, 865 nt, synthetic construct
  misc_feature 1..865: note = Artificial____CBFbeta(1-165)_Linker_Lifeact mRNA opt3
  source 1..865: mol_type = other RNA
aggagagtcccgcagtcggcgtccagcggctctgcttgttcgtgtgtgtgtcgttgcaggccttattcaagcttaccatgcctagagtggtgcccgaccagagaagcaagttcgagaacgaagagttctttcggaagctgagcagagagtgcgagatcaagtacaccggcttccgggacagaccccacgaagaaagacaggccagattccagaacgcctgcagagatggcagatccgagatcgcctttgtggccaccggcaccaatctgagcctgcagttctttccagcctcctggcagggcgagcagagacaaacacccagcagagaatacgtggacctggaacgcgaggccggcaaggtgtacctgaaggcccctatgatcctgaacggcgtgtgcgtgatctggaaaggctggatcgatctgcagcggctggatggcatgggctgcctggaatttgacgaggaaagagcccagcaagaggacgcccttgctcagcaggcctttgaggaagccagaaggcggaccagagagttcgaggacagagacagatcccaccgggaagagatggaaggcggatctggtggaagcggaggtagcggaggatcaggcggaggcggagttgccgatctgatcaagaagttcgagtccatcagcaaagaagagggcgaccctccagtggccacatgaggactagtccctgttcccagagcccacttttttttctttttttgaaataaaatagcctgtctttcagatctaaaaaaaaaaaaaaaaaaaaaaaaaaaaaaaaaaaaaaaaaaaaaaaaaaaaaaaaaaaaaaaaaaaaaaaaaaaaaaaaaaaaaaaaaaaaaaaaaaaagaatt

SEQ ID NO: 1382 - RNA, 832 nt, synthetic construct
  misc_feature 1..832: note = Artificial____CBFbeta(1-165)_HIF1alpha(549-575) mRNA opt3
  source 1..832: mol_type = other RNA
aggagagtcccgcagtcggcgtccagcggctctgcttgttcgtgtgtgtgtcgttgcaggccttattcaagcttaccatgcctagagtggtgcccgaccagagaagcaagttcgagaacgaagagttctttcggaagctgagcagagagtgcgagatcaagtacaccggcttccgggacagaccccacgaagaaagacaggccagattccagaacgcctgcagagatggcagatccgagatcgcctttgtggccaccggcaccaatctgagcctgcagttctttccagcctcctggcagggcgagcagagacaaacacccagcagagaatacgtggacctggaacgcgaggccggcaaggtgtacctgaaggcccctatgatcctgaacggcgtgtgcgtgatctggaaaggctggatcgatctgcagcggctggatggcatgggctgcctggaatttgacgaggaaagagcccagcaagaggacgcccttgctcagcaggcctttgaggaagccagaaggcggaccagagagttcgaggacagagacagatcccaccgggaagagatggaacccttcagcacccaagacaccgacctggacctcgaaatgctggccccttacatccccatggacgacgacttccagctgcggtaaggactagtccctgttcccagagcccacttttttttctttttttgaaataaaatagcctgtctttcagatctaaaaaaaaaaaaaaaaaaaaaaaaaaaaaaaaaaaaaaaaaaaaaaaaaaaaaaaaaaaaaaaaaaaaaaaaaaaaaaaaaaaaaaaaaaaaaaaaaaaagaatt

SEQ ID NO: 1383 - RNA, 877 nt, synthetic construct
  misc_feature 1..877: note Artificial____CBFbeta(1-165)_Linker_HIF1alpha(549-575) mRNA opt3
  source 1..877: mol_type = other RNA
aggagagtcccgcagtcggcgtccagcggctctgcttgttcgtgtgtgtgtcgttgcaggccttattcaagcttaccatgcctagagtggtgcccgaccagagaagcaagttcgagaacgaagagttctttcggaagctgagcagagagtgcgagatcaagtacaccggcttccgggacagaccccacgaagaaagacaggccagattccagaacgcctgcagagatggcagatccgagatcgcctttgtggccaccggcaccaatctgagcctgcagttctttccagcctcctggcagggcgagcagagacaaacacccagcagagaatacgtggacctggaacgcgaggccggcaaggtgtacctgaaggcccctatgatcctgaacggcgtgtgcgtgatctggaaaggctggatcgatctgcagcggctggatggcatgggctgcctggaatttgacgaggaaagagcccagcaagaggacgcccttgctcagcaggcctttgaggaagccagaaggcggaccagagagttcgaggacagagacagatcccaccgggaagagatggaaggcggatctggtggaagcggaggtagcggaggatctggcggaggacctttcagcacccaagacaccgacctggacctcgaaatgctggccccttacatccccatggacgacgacttccagctgcggtaaggactagtccctgttcccagagcccacttttttttctttttttgaaataaaatagcctgtctttcagatctaaaaaaaaaaaaaaaaaaaaaaaaaaaaaaaaaaaaaaaaaaaaaaaaaaaaaaaaaaaaaaaaaaaaaaaaaaaaaaaaaaaaaaaaaaaaaaaaaaaagaatt

SEQ ID NO: 1384 - RNA, 2512 nt, synthetic construct
  misc_feature 1..2512: note = Artificial____RUNX1(1-177)_N_RUNX1T1a(31-604) mRNA opt3
  source 1..2512: mol_type = other RNA
aggagagtcccgcagtcggcgtccagcggctctgcttgttcgtgtgtgtgtcgttgcaggccttattcaagcttaccatgagaatccccgtggatgccagcaccagcagaagattcacccctcctagcaccgctctgagccctggcaagatgtctgaagctctgcctctgggagcacctgatgctggtgcagctctggccggaaaactgagaagcggcgacagatccatggtggaagtgctggctgatcaccccggcgaacttgtgcggacagacagccctaatttcctgtgcagcgtgctgcctacacactggcggtgcaacaagacactgcctatcgccttcaaggtggtggctctgggagatgtgcctgatggcacactggtcacagtgatggccggcaacgacgagaattacagcgccgagctgagaaatgccaccgccgccatgaagaaccaggtggccagattcaacgacctgagattcgtgggcagaagcggcaggggcaagagctttaccctgaccatcaccgtgttcaccaatcctccacaggtggcaacctaccaccgggccatcaagatcaccgtggatggccctagagagccccggaacagaacagagaagcacagcaccatgcctgacagccccgtggacgtgaaaacccagagcagactgacccctccaaccatgcctcctccacctacaacacagggcgctcctagaaccagcagcttcacccctaccacactgaccaacggcacctctcacagccccacagctcttaatggcgccccttctccacctaacggcttcagcaatggcccaagcagcagcagctctagcagcctggctaatcagcagctgcctcctgcttgtggcgctagacagctgagcaagctgaagcggttcctgaccacactgcagcagttcggcaacgatatcagccccgagatcggcgagcgcgtcagaacactggttctgggcctcgtgaatagcaccctgacaatcgaagagttccacagcaagctgcaagaggccaccaactttccgctgcggcctttcgtgatcccattcctgaaggccaacctgcctctgctgcagagagaactgctccactgcgccagactggccaagcagaaccctgctcagtatctggcccagcacgagcaactgctgctggacgcctctacaacaagccctgtggatagcagcgagctgctcctggatgtgaacgagaacggcaagcggagaacccctgaccggaccaaagagaacggcttcgacagagagcctctgcacagcgagcaccccagcaaaagaccctgcacaatcagccctggccagcggtactctcccaacaacggcctgagctaccagcctaacggactgccccatcctacacctccacctccacagcactaccggctggacgatatggctatcgcccaccactaccgggacagctacagacaccctagccaccgggacctgcgggacagaaatagacctatgggcctgcacggcacccggcaagaggaaatgattgaccaccggctgaccgacagagaatgggccgaagagtggaagcacctggaccatctgctgaactgcatcatggatatggtggaaaagacccggcggagcctgaccgtgctgagaagatgtcaagaggccgatagagaggaactgaactactggatccggcggtacagcgacgccgaggatcttaagaaaggcggcggatctagcagcagccacagcagacagcagagccccgtgaatcctgatcctgtggcactggatgcccacagagaatttctgcacagacccgccagcggctacgtgccagaggaaatctggaagaaagccgaagaggccgtgaacgaagtgaagagacaggccatgaccgaactgcagaaagccgtgtctgaggccgagagaaaggcccacgatatgatcacaaccgagcgggccaagatggaaagaacagtggccgaggccaaaagacaggccgccgaagatgctctggctgtgatcaatcagcaagaggacagcagcgagtcctgctggaactgtggcagaaaggccagcgagacatgcagcggctgtaacaccgccagatattgcggcagcttctgccagcacaaggactgggagaagcaccaccacatctgcggccagacactgcaggctcagcagcaaggcgatactcctgccgtgtctagcagcgtgacccctaattctggcgccggatctcccatggatacccctccagctgccacacctagaagcacaacccctggcacacccagcaccatcgagacaacccctagatgaggactagtccctgttcccagagcccacttttttttctttttttgaaataaaatagcctgtctttcagatctaaaaaaaaaaaaaaaaaaaaaaaaaaaaaaaaaaaaaaaaaaaaaaaaaaaaaaaaaaaaaaaaaaaaaaaaaaaaaaaaaaaaaaaaaaaaaaaaaaaagaatt

SEQ ID NO: 1385 - RNA, 1027 nt, synthetic construct
  misc_feature 1..1027: note = Artificial____RUNX1(1-241)_RUNX1T1b(short) mRNA opt3
  source 1..1027: mol_type = other RNA
aggagagtcccgcagtcggcgtccagcggctctgcttgttcgtgtgtgtgtcgttgcaggccttattcaagcttaccatgagaatccccgtggatgccagcaccagcagaagattcacccctcctagcaccgctctgagccctggcaagatgtctgaagctctgcctctgggagcacctgatgctggtgcagctctggccggaaaactgagaagcggcgacagatccatggtggaagtgctggctgatcaccccggcgaacttgtgcggacagacagccctaatttcctgtgcagcgtgctgcctacacactggcggtgcaacaagacactgcctatcgccttcaaggtggtggctctgggagatgtgcctgatggcacactggtcacagtgatggccggcaacgacgagaattacagcgccgagctgagaaatgccaccgccgccatgaagaaccaggtggccagattcaacgacctgagattcgtgggcagaagcggcaggggcaagagctttaccctgaccatcaccgtgttcaccaatcctccacaggtggcaacctaccaccgggccatcaagatcaccgtggatggccctagagagcccagacggcacagacagaaactggacgaccagaccaagcctggcagcctgagctttagcgagagactgagcgagctggaacagctgagaagaaccgccatgcgggtgtccccacatcaccctgctcctacacctaatcctcgggccagcctgaatcacagcaccgcctttaatccccagcctcagagccagatgcaagaagtgggcttctgtcacgtggcccaagtgggactgaagctgctgggataaggactagtccctgttcccagagcccacttttttttctttttttgaaataaaatagcctgtctttcagatctaaaaaaaaaaaaaaaaaaaaaaaaaaaaaaaaaaaaaaaaaaaaaaaaaaaaaaaaaaaaaaaaaaaaaaaaaaaaaaaaaaaaaaaaaaaaaaaaaaaagaatt

SEQ ID NO: 1386 - RNA, 2731 nt, synthetic construct
  misc_feature 1..2731: note = Artificial____RUNX1(1-241)_V_RUNX1T1b(22-604) mRNA opt3
  source 1..2731: mol_type = other RNA
aggagagtcccgcagtcggcgtccagcggctctgcttgttcgtgtgtgtgtcgttgcaggccttattcaagcttaccatgagaatccccgtggatgccagcaccagcagaagattcacccctcctagcaccgctctgagccctggcaagatgtctgaagctctgcctctgggagcacctgatgctggtgcagctctggccggaaaactgagaagcggcgacagatccatggtggaagtgctggctgatcaccccggcgaacttgtgcggacagacagccctaatttcctgtgcagcgtgctgcctacacactggcggtgcaacaagacactgcctatcgccttcaaggtggtggctctgggagatgtgcctgatggcacactggtcacagtgatggccggcaacgacgagaattacagcgccgagctgagaaatgccaccgccgccatgaagaaccaggtggccagattcaacgacctgagattcgtgggcagaagcggcaggggcaagagctttaccctgaccatcaccgtgttcaccaatcctccacaggtggcaacctaccaccgggccatcaagatcaccgtggatggccctagagagcccagacggcacagacagaaactggacgaccagaccaagcctggcagcctgagctttagcgagagactgagcgagctggaacagctgagaagaaccgccatgcgggtgtccccacatcaccctgctcctacacctaatcctcgggccagcctgaatcacagcaccgcctttaatccccagcctcagagccagatgcaagtgggccctgagaaaagggtgccagccatgcctggaagccccgtggaagtgaagatccagagcagatctagccctcctaccatgcctcctctgcctccaatcaatcctggcggccctagacctgtgtccttcacacctaccgctctgtccaacggcatcaatcacagccctccaacactgaatggcgccccatctccacctcagcggttttctaatggccctgccagcagcacaagcagcgccctgacaaatcagcagctgcctgctacatgtggcgccagacagctgagcaagctgaagcggtttctgaccacactgcagcagttcggcaacgatatcagccccgagatcggcgagaaagtgcggacactggttctggccctggtcaacagcaccgtgaccatcgaagagttccactgcaagctgcaagaggccaccaactttccgctgcggcctttcgtgatcccattcctgaaggccaacctgcctctgctgcagagagagctgctgcattgcgccagagccgccaagcagacaccttctcagtatctggcccagcacgagcatctgctgctgaacacctctatcgcctctccagccgatagcagcgagctgctcatggaagtgcacggcaacggaaagaggccctctccagagcggagagaggaaaacagcttcgaccgggacacaatcgcccctgagcctccagccaagagagtgtgcacaatcagcccagctcctagacacagccccgctctgacagtgccccttatgaaccctggcggacagtttcaccccacacctccaccactccagcactacaccctggaagatatcgccaccagccacctgtaccgcgagcctaacaagatgctggaacaccgggaagtgcgcgacaggcaccattctctgggactgaacggcggctaccaggacgaactggtggatcacagactgaccgagcgcgagtgggccgatgaatggaaacacctggatcacgccctgaactgcatcatggaaatggtggaaaagacccggcggagcatggccgtcctgagaagatgtcaagagagcgacagagaggaactgaactactggaagcggaggtacaacgagaacaccgagctgcggaaaaccggcactgagctggtgtccagacagcactctcctggctctgccgatagcctgagcaacgactcccagagagagttcaacagcagacccggcacaggctacgtgcccgtggaattttggaagaaaaccgaagaggccgtgaacaaagtcaagattcaggccatgagcgaggtgcagaaagccgtggctgaggccgaacagaaagccttcgaagtgatcgccaccgagcgggccagaatggaacagacaatcgccgacgtgaagagacaggccgccgaggatgccttcctggtcatcaacgagcaagaggaaagcaccgagaactgctggaactgcggcagaaaggccagcgagacatgcagcggctgcaatatcgccagatattgcggcagcttctgccagcacaaggactgggagagacaccacagactgtgcggccagaatctgcacggacagagccctcatggacagggcagacctctgctccctgttggcagaggatctagcgccagatctgccgactgtagcgtgccatctcctgcactggataagaccagcgccaccacaagcagaagcagcacaccagcctctgtgaccgccatcgataccaacggactgtgaggactagtccctgttcccagagcccacttttttttctttttttgaaataaaatagcctgtctttcagatctaaaaaaaaaaaaaaaaaaaaaaaaaaaaaaaaaaaaaaaaaaaaaaaaaaaaaaaaaaaaaaaaaaaaaaaaaaaaaaaaaaaaaaaaaaaaaaaaaaaagaatt

SEQ ID NO: 1387 - RNA, 2731 nt, synthetic construct
  misc_feature 1..2731: note = Artificial____RUNX1(1-241)_I_RUNX1T1b(22-604) mRNA opt3
  source 1..2731: mol_type = other RNA
aggagagtcccgcagtcggcgtccagcggctctgcttgttcgtgtgtgtgtcgttgcaggccttattcaagcttaccatgagaatccccgtggatgccagcaccagcagaagattcacccctcctagcaccgctctgagccctggcaagatgtctgaagctctgcctctgggagcacctgatgctggtgcagctctggccggaaaactgagaagcggcgacagatccatggtggaagtgctggctgatcaccccggcgaacttgtgcggacagacagccctaatttcctgtgcagcgtgctgcctacacactggcggtgcaacaagacactgcctatcgccttcaaggtggtggctctgggagatgtgcctgatggcacactggtcacagtgatggccggcaacgacgagaattacagcgccgagctgagaaatgccaccgccgccatgaagaaccaggtggccagattcaacgacctgagattcgtgggcagaagcggcaggggcaagagctttaccctgaccatcaccgtgttcaccaatcctccacaggtggcaacctaccaccgggccatcaagatcaccgtggatggccctagagagcccagacggcacagacagaaactggacgaccagaccaagcctggcagcctgagctttagcgagagactgagcgagctggaacagctgagaagaaccgccatgcgggtgtccccacatcaccctgctcctacacctaatcctcgggccagcctgaatcacagcaccgcctttaatccccagcctcagagccagatgcagatcggccctgagaaaagggtgccagccatgcctggaagccccgtggaagtgaagatccagagcagatctagccctcctaccatgcctcctctgcctccaatcaatcctggcggccctagacctgtgtccttcacacctaccgctctgtccaacggcatcaatcacagccctccaacactgaatggcgccccatctccacctcagcggttttctaatggccctgccagcagcacaagcagcgccctgacaaatcagcagctgcctgctacatgtggcgccagacagctgagcaagctgaagcggtttctgaccacactgcagcagttcggcaacgatatcagccccgagatcggcgagaaagtgcggacactggttctggccctggtcaacagcaccgtgaccatcgaagagttccactgcaagctgcaagaggccaccaactttccgctgcggcctttcgtgatcccattcctgaaggccaacctgcctctgctgcagagagagctgctgcattgcgccagagccgccaagcagacaccttctcagtatctggcccagcacgagcatctgctgctgaacacctctatcgcctctccagccgatagcagcgagctgctcatggaagtgcacggcaacggaaagaggccctctccagagcggagagaggaaaacagcttcgaccgggacacaatcgcccctgagcctccagccaagagagtgtgcacaatcagcccagctcctagacacagccccgctctgacagtgccccttatgaaccctggcggacagtttcaccccacacctccaccactccagcactacaccctggaagatatcgccaccagccacctgtaccgcgagcctaacaagatgctggaacaccgggaagtgcgcgacaggcaccattctctgggactgaacggcggctaccaggacgaactggtggatcacagactgaccgagcgcgagtgggccgatgaatggaaacacctggatcacgccctgaactgcatcatggaaatggtggaaaagacccggcggagcatggccgtcctgagaagatgtcaagagagcgacagagaggaactgaactactggaagcggaggtacaacgagaacaccgagctgcggaaaaccggcactgagctggtgtccagacagcactctcctggctctgccgatagcctgagcaacgactcccagagagagttcaacagcagacccggcacaggctacgtgcccgtggaattttggaagaaaaccgaagaggccgtgaacaaagtcaagattcaggccatgagcgaggtgcagaaagccgtggctgaggccgaacagaaagccttcgaagtgatcgccaccgagcgggccagaatggaacagacaatcgccgacgtgaagagacaggccgccgaggatgccttcctggtcatcaacgagcaagaggaaagcaccgagaactgctggaactgcggcagaaaggccagcgagacatgcagcggctgcaatatcgccagatattgcggcagcttctgccagcacaaggactgggagagacaccacagactgtgcggccagaatctgcacggacagagccctcatggacagggcagacctctgctccctgttggcagaggatctagcgccagatctgccgactgtagcgtgccatctcctgcactggataagaccagcgccaccacaagcagaagcagcacaccagcctctgtgaccgccatcgataccaacggactgtgaggactagtccctgttcccagagcccacttttttttctttttttgaaataaaatagcctgtctttcagatctaaaaaaaaaaaaaaaaaaaaaaaaaaaaaaaaaaaaaaaaaaaaaaaaaaaaaaaaaaaaaaaaaaaaaaaaaaaaaaaaaaaaaaaaaaaaaaaaaaaagaatt

SEQ ID NO: 1388 - RNA, 1615 nt, synthetic construct
  misc_feature 1..1615: note = Homo sapiens__Q01196-1__RUNX1(K83E_R174Q) mRNA opt3
  source 1..1615: mol_type = other RNA
aggagagtcccgcagtcggcgtccagcggctctgcttgttcgtgtgtgtgtcgttgcaggccttattcaagcttaccatgagaatccccgtggacgccagcacctccaggcggttcacacctccatctactgctctgtcaccgggcaagatgagtgaggcactcccccttggggcccctgatgcgggagctgccctggcaggtaaattgcgcagcggcgaccgatccatggtcgaagttttagccgatcacccaggggagctggtgcgtacggactctcccaactttctatgctcggtactccctacccattggagatgtaatgaaacactgccaattgctttcaaggtggtcgcacttggagatgtgcccgacggcactctggttaccgtgatggccggtaacgatgagaattactcagctgaattgaggaacgccacagcggcaatgaaaaatcaggtcgcccggtttaacgacctccgcttcgtggggagaagcggaaggggcaagagttttaccctgactataacagtattcaccaatcctccacaagttgctacgtatcaccgggccatcaaaattactgtggatggcccgcaggagccccgccgacatagacagaagctggacgatcagaccaagcctgggtccctctcttttagcgagaggttatccgaactggagcaacttcggcgtacagcaatgcgcgtctcaccacaccatcccgctcctactccaaaccccagagccagtttgaatcacagcaccgcgttcaacccgcagcctcagtctcagatgcaagacacaaggcagatccagccctccccaccttggtcatacgatcagagctatcaatacctgggaagtattgcctctccctccgtgcacccagcaacccccatcagccctggtcgggcttcgggcatgacgactctatctgccgaactctcctcacgactgagtacagctccagaccttaccgcctttagcgacccgcgccagttccccgcactgccttccatatctgatccaagaatgcattatcccggggcctttacttacagccctacaccagtgacctcaggaatcggcattggtatgagtgctatggggtccgcgacgaggtatcacacctacttgcccccgccttacccaggaagctctcaggcacaaggcggccccttccaggcctcaagtcctagctatcatctctactatggggcttccgccggatcttaccagttttcgatggtcggtggcgagcggagcccaccccgcatcctgcctccctgcacaaatgcatccactgggtcagccttactgaacccaagtctcccgaatcagtctgacgttgtggaggctgaaggaagccactccaactcacctaccaatatggcccccagcgcaagacttgaggaagcggtatggaggccatattgaggactagtccctgttcccagagcccacttttttttctttttttgaaataaaatagcctgtctttcagatctaaaaaaaaaaaaaaaaaaaaaaaaaaaaaaaaaaaaaaaaaaaaaaaaaaaaaaaaaaaaaaaaaaaaaaaaaaaaaaaaaaaaaaaaaaaaaaaaaaaagaatt

SEQ ID NO: 1389 - RNA, 2089 nt, synthetic construct
  misc_feature 1..2089: note = Homo sapiens____CBFbeta(1-165)_SMMHC(1527-1972) mRNA opt3
  source 1..2089: mol_type = other RNA
aggagagtcccgcagtcggcgtccagcggctctgcttgttcgtgtgtgtgtcgttgcaggccttattcaagcttaccatgcccagagtggtccctgaccagaggagcaagttcgagaacgaagagtttttccggaaactgtcccgcgaatgcgagatcaagtacaccggctttcgagatcgtccacacgaagagagacaagccaggttccagaatgcttgtcgggacgggcgctctgagattgcatttgttgccacaggaactaacctctcacttcagttctttccggcgagttggcagggtgaacaaagacagacgcccagcagggagtatgtggatctggaacgggaggctggcaaagtatacttgaaggcccctatgatattaaatggggtgtgcgtcatctggaaaggatggattgacctgcagcgcctagatggcatgggttgtctcgagttcgacgaggaacgagcacagcaagaagatgccctggctcagcaggcatttgaggaagccagaaggcggacccgtgagttcgaggaccgcgatagatcccatagggaagagatggaagtgcacgagcttgaaaagtctaagcgggctctggagacacagatggaggaaatgaaaactcaattggaggaactcgaggacgaactgcaggccaccgaggatgcgaagctgcgactcgaggttaacatgcaggcattaaaagggcaatttgaacgcgacctgcaggccagagatgagcagaatgaagagaagaggcggcagcttcaacgccagttgcatgagtatgaaacagagctggaagacgagagaaaacagagggctctagccgcagctgccaagaagaaactcgaaggagacctgaaggatcttgagctgcaggcggactcggccatcaaaggccgtgaggaagcaattaagcaattgcggaaactccaggctcagatgaaggatttccagcgagagctggaagacgccagagcttcaagggatgagatctttgccaccgcaaaagaaaacgagaagaaggccaagagcttagaggctgacctgatgcaactccaggaagatcttgcggcagccgagcgcgctcggaagcaggccgacctggaaaaagaggaattggcagaggagctagccagttccctgtctggcagaaatgctctccaggatgaaaagaggcgcctggaggcccgaatagcacaacttgaagaggagctggaagaggaacaggggaacatggaggcgatgagcgaccgggtgcgtaaagctactcagcaagccgaacagttgtccaatgagctcgcaacagagagatcaaccgcccagaagaacgaaagtgctaggcagcaactggagcgccagaataaggaattacggagcaaactgcacgagatggaaggagccgtcaagtctaaattcaagtccacgatcgcagctctagaggccaaaattgcgcagctcgaggaacaggtggagcaagaagccagagagaagcaggctgcaactaagtcactgaaacagaaggataaaaagttgaaagaaatccttctgcaggtagaggacgagaggaagatggccgaacaatacaaggagcaggctgaaaaaggtaacgcccgagttaagcagctcaaacgccaactggaggaggcagaagaggaaagccagcggattaatgcgaacagaaggaaacttcagcgtgagctggacgaagccaccgagagtaatgaggctatgggccgcgaagtgaacgccttgaaatctaagctccggagagggaacgagacatccttcgtcccaagcaggcgatcgggaggccggcgcgtgatcgaaaatgcagatggttctgaggaagagactgacaccagagatgctgactttaacgggacaaaagcctccgagtgaggactagtccctgttcccagagcccacttttttttctttttttgaaataaaatagcctgtctttcagatctaaaaaaaaaaaaaaaaaaaaaaaaaaaaaaaaaaaaaaaaaaaaaaaaaaaaaaaaaaaaaaaaaaaaaaaaaaaaaaaaaaaaaaaaaaaaaaaaaaaagaatt

SEQ ID NO: 1390 - RNA, 1804 nt, synthetic construct
  misc_feature 1..1804: note = Artificial____CBFbeta(1-165)_SMMHC(1527-1877) mRNA opt3
  source 1..1804: mol_type = other RNA
aggagagtcccgcagtcggcgtccagcggctctgcttgttcgtgtgtgtgtcgttgcaggccttattcaagcttaccatgcccagagtggtccctgaccagaggagcaagttcgagaacgaagagtttttccggaaactgtcccgcgaatgcgagatcaagtacaccggctttcgagatcgtccacacgaagagagacaagccaggttccagaatgcttgtcgggacgggcgctctgagattgcatttgttgccacaggaactaacctctcacttcagttctttccggcgagttggcagggtgaacaaagacagacgcccagcagggagtatgtggatctggaacgggaggctggcaaagtatacttgaaggcccctatgatattaaatggggtgtgcgtcatctggaaaggatggattgacctgcagcgcctagatggcatgggttgtctcgagttcgacgaggaacgagcacagcaagaagatgccctggctcagcaggcatttgaggaagccagaaggcggacccgtgagttcgaggaccgcgatagatcccatagggaagagatggaagtgcacgagcttgaaaagtctaagcgggctctggagacacagatggaggaaatgaaaactcaattggaggaactcgaggacgaactgcaggccaccgaggatgcgaagctgcgactcgaggttaacatgcaggcattaaaagggcaatttgaacgcgacctgcaggccagagatgagcagaatgaagagaagaggcggcagcttcaacgccagttgcatgagtatgaaacagagctggaagacgagagaaaacagagggctctagccgcagctgccaagaagaaactcgaaggagacctgaaggatcttgagctgcaggcggactcggccatcaaaggccgtgaggaagcaattaagcaattgcggaaactccaggctcagatgaaggatttccagcgagagctggaagacgccagagcttcaagggatgagatctttgccaccgcaaaagaaaacgagaagaaggccaaaagccttgaggctgacctgatgcaactccaggaagatcttgcggcagccgagcgcgctcggaagcaggccgacctggaaaaagaggaattggcagaggagctagccagttccctgtctggcagaaatgctctccaggatgaaaagaggcgcctggaggcccgaatagcacaacttgaagaggagctggaagaggaacaggggaacatggaggcgatgagcgaccgggtgcgtaaagctactcagcaagccgaacagttgtccaatgagctcgcaacagagagatcaaccgcccagaagaacgaaagtgctaggcagcaactggagcgccagaataaggaattacggagcaaactgcacgagatggaaggagccgtcaagtctaaattcaagtccacgatcgcagctctagaggccaaaattgcgcagctcgaggaacaggtggagcaagaagccagagagaagcaggctgcaactaagtcactgaaacagaaggataaaaagttaaaagaaatcttgctgcaggtagaggacgagaggaagatggccgaacaatacaaggagcaggctgaaaaaggtaacgcctgaggactagtccctgttcccagagcccacttttttttctttttttgaaataaaatagcctgtctttcagatctaaaaaaaaaaaaaaaaaaaaaaaaaaaaaaaaaaaaaaaaaaaaaaaaaaaaaaaaaaaaaaaaaaaaaaaaaaaaaaaaaaaaaaaaaaaaaaaaaaaagaatt

SEQ ID NO: 1391 - RNA, 865 nt, synthetic construct
  misc_feature 1..865: note = Artificial____CBFbeta(1-165)_Linker_Lifeact mRNA opt3
  source 1..865: mol_type = other RNA
aggagagtcccgcagtcggcgtccagcggctctgcttgttcgtgtgtgtgtcgttgcaggccttattcaagcttaccatgcccagagtggtccctgaccagaggagcaagttcgagaacgaagagtttttccggaaactgtcccgcgaatgcgagatcaagtacaccggctttcgagatcgtccacacgaagagagacaagccaggttccagaatgcttgtcgggacgggcgctctgagattgcatttgttgccacaggaactaacctctcacttcagttctttccggcgagttggcagggtgaacaaagacagacgcccagcagggagtatgtggatctggaacgggaggctggcaaagtatacttgaaggcccctatgatattaaatggggtgtgcgtcatctggaaaggatggattgacctgcagcgcctagatggcatgggttgtctcgagttcgacgaggaacgagcacagcaagaagatgccctggctcagcaggcatttgaggaagccagaaggcggacccgtgagttcgaggaccgcgatagatcccatagggaagagatggaagggggatctggcggctcagggggatcgggtggcagcgggggaggcggtgtggctgaccttatcaagaagtttgagagtatttccaaagaagagggggatccacccgttgccacatgaggactagtccctgttcccagagcccacttttttttctttttttgaaataaaatagcctgtctttcagatctaaaaaaaaaaaaaaaaaaaaaaaaaaaaaaaaaaaaaaaaaaaaaaaaaaaaaaaaaaaaaaaaaaaaaaaaaaaaaaaaaaaaaaaaaaaaaaaaaaaagaatt

SEQ ID NO: 1392 - RNA, 832 nt, synthetic construct
  misc_feature 1..832: note = Artificial____CBFbeta(1-165)_HIF1alpha(549-575) mRNA opt3
  source 1..832: mol_type = other RNA
aggagagtcccgcagtcggcgtccagcggctctgcttgttcgtgtgtgtgtcgttgcaggccttattcaagcttaccatgcccagagtggtccctgaccagaggagcaagttcgagaacgaagagtttttccggaaactgtcccgcgaatgcgagatcaagtacaccggctttcgagatcgtccacacgaagagagacaagccaggttccagaatgcttgtcgggacgggcgctctgagattgcatttgttgccacaggaactaacctctcacttcagttctttccggcgagttggcagggtgaacaaagacagacgcccagcagggagtatgtggatctggaacgggaggctggcaaagtatacttgaaggcccctatgatattaaatggggtgtgcgtcatctggaaaggatggattgacctgcagcgcctagatggcatgggttgtctcgagttcgacgaggaacgagcacagcaagaagatgccctggctcagcaggcatttgaggaagccagaaggcggacccgtgagttcgaggaccgcgatagatcccatagggaagagatggaaccattttctacacaggacactgatcttgacctggagatgttggctccctatatccctatggatgacgacttccaactccggtgaggactagtccctgttcccagagcccacttttttttctttttttgaaataaaatagcctgtctttcagatctaaaaaaaaaaaaaaaaaaaaaaaaaaaaaaaaaaaaaaaaaaaaaaaaaaaaaaaaaaaaaaaaaaaaaaaaaaaaaaaaaaaaaaaaaaaaaaaaaaaagaatt

SEQ ID NO: 1393 - RNA, 877 nt, synthetic construct
  misc_feature 1..877: note Artificial____CBFbeta(1-165)_Linker_HIF1alpha(549-575) mRNA opt3
  source 1..877: mol_type = other RNA
aggagagtcccgcagtcggcgtccagcggctctgcttgttcgtgtgtgtgtcgttgcaggccttattcaagcttaccatgcccagagtggtccctgaccagaggagcaagttcgagaacgaagagtttttccggaaactgtcccgcgaatgcgagatcaagtacaccggctttcgagatcgtccacacgaagagagacaagccaggttccagaatgcttgtcgggacgggcgctctgagattgcatttgttgccacaggaactaacctctcacttcagttctttccggcgagttggcagggtgaacaaagacagacgcccagcagggagtatgtggatctggaacgggaggctggcaaagtatacttgaaggcccctatgatattaaatggggtgtgcgtcatctggaaaggatggattgacctgcagcgcctagatggcatgggttgtctcgagttcgacgaggaacgagcacagcaagaagatgccctggctcagcaggcatttgaggaagccagaaggcggacccgtgagttcgaggaccgcgatagatcccatagggaagagatggaagggggatctggcggctcagggggatcgggtggcagcgggggaggcccatttagtacacaggacactgatcttgacctggagatgttggctccctatatccctatggatgacgacttccaactccggtgaggactagtccctgttcccagagcccacttttttttctttttttgaaataaaatagcctgtctttcagatctaaaaaaaaaaaaaaaaaaaaaaaaaaaaaaaaaaaaaaaaaaaaaaaaaaaaaaaaaaaaaaaaaaaaaaaaaaaaaaaaaaaaaaaaaaaaaaaaaaaagaatt

SEQ ID NO: 1394 - RNA, 2512 nt, synthetic construct
  misc_feature 1..2512: note = Artificial____RUNX1(1-177)_N_RUNX1T1a(31-604) mRNA opt3
  source 1..2512: mol_type = other RNA
aggagagtcccgcagtcggcgtccagcggctctgcttgttcgtgtgtgtgtcgttgcaggccttattcaagcttaccatgagaatccccgtggacgccagcacctccaggcggttcacacctccatctactgctctgtcaccgggcaagatgagtgaggcactcccccttggggcccctgatgcgggagctgccctggcaggtaaattgcgcagcggcgaccgatccatggtcgaagttttagccgatcacccaggggagctggtgcgtacggactctcccaactttctatgctcggtactccctacccattggagatgtaataagacactgccaattgctttcaaagtggtcgcacttggagatgtgcccgacggcactctggttaccgtgatggccggtaacgatgaaaattactcagctgagttgaggaacgccacagcggcaatgaagaatcaggtcgcccggtttaacgacctccgcttcgtggggagaagcggaaggggcaaaagttttaccctgactataacagtattcaccaatcctccacaagttgctacgtatcaccgggccatcaagattactgtggatggcccgcgcgaaccccgaaacagaaccgagaagcattccacaatgcctgactctccagtcgatgtgaaaactcagagcaggctgacaccccctaccatgccacccccgcctaccacgcagggggcaccccggacttcctcatttacaccaaccactctcacaaatggaaccagtcacagccctacggctttaaacggtgccccctctccacccaatggcttctccaacgggccttcaagcagttcttccagctcgctggcgaatcagcaacttccaccggcctgcggagcacgtcagttgtctaagctgaaacgctttctaaccacactccagcagttcggcaacgacatctcccccgagattggtgaaagagtgaggactctggtccttgggctggttaattcaaccttgacaatcgaggaatttcatagtaagctccaagaggctactaacttccctctgcggccatttgtgatacccttcttaaaagccaacctgcctctccttcagcgagagctgttgcactgtgctcgcctagccaagcagaatccagcacagtacctggcccaacacgaacagctcctgcttgatgctagcaccacatcccccgtagactctagcgagctgttgctcgacgtgaacgaaaatggaaagagaaggaccccggatcggactaaagagaacggcttcgaccgcgaacctctgcattcagagcacccaagtaagagaccctgcacgatctcccctggccagaggtatagccccaataacgggttatcttaccaaccaaatggactgcctcatcccacaccaccgcctccccagcactatcgtctagatgacatggcgattgcacaccattaccgggattcatatcgacacccaagtcatagagacctcagggatcgcaaccggcccatgggtctgcacggcaccagacaggaggaaatgatcgaccataggcttactgatcgcgagtgggccgaagagtggaaacacttggaccatctgctcaattgtattatggatatggtcgaaaagacccgacggagcctgacagtgcttcgtagatgccaggaggctgacagggaggaactgaactactggatccgccggtactccgacgccgaggatttgaaaaagggcggagggtcttcgagctcccactcaagacaacagagtcctgttaatccagaccccgtggcactcgatgcccacagggaatttctgcatcgacctgcttctggttatgtcccggaggaaatatggaaaaaggccgaggaggcagtgaacgaagtaaagcgccaggcgatgaccgagttacagaaagctgttagcgaagccgagcggaaggcacacgacatgattactacagagagagccaaaatggaaaggacggtggctgaggccaagcgtcaagcagctgaagatgccctggcggtcatcaatcagcaggaggactcctcagaaagctgttggaactgcgggcgcaaagcctctgagacctgttccggctgcaatactgctcggtactgtggaagtttctgccagcacaaggattgggagaagcatcaccatatttgcggccaaacactacaggcacagcagcaaggggacaccccagccgtgtctagctccgtcacacccaactcaggagctggtagtcctatggatactccacccgccgcaacccctagaagcacgaccccgggcacaccctcgactatcgaaaccacaccaaggtgaggactagtccctgttcccagagcccacttttttttctttttttgaaataaaatagcctgtctttcagatctaaaaaaaaaaaaaaaaaaaaaaaaaaaaaaaaaaaaaaaaaaaaaaaaaaaaaaaaaaaaaaaaaaaaaaaaaaaaaaaaaaaaaaaaaaaaaaaaaaaagaatt

SEQ ID NO: 1395 - RNA, 1027 nt, synthetic construct
  misc_feature 1..1027: note = Artificial____RUNX1(1-241)_RUNX1T1b(short) mRNA opt3
  source 1..1027: mol_type = other RNA
aggagagtcccgcagtcggcgtccagcggctctgcttgttcgtgtgtgtgtcgttgcaggccttattcaagcttaccatgagaatccccgtggacgccagcacctccaggcggttcacacctccatctactgctctgtcaccgggcaagatgagtgaggcactcccccttggggcccctgatgcgggagctgccctggcaggtaaattgcgcagcggcgaccgatccatggtcgaagttttagccgatcacccaggggagctggtgcgtacggactctcccaactttctatgctcggtactccctacccattggagatgtaataagacactgccaattgctttcaaagtggtcgcacttggagatgtgcccgacggcactctggttaccgtgatggccggtaacgatgaaaattactcagctgagttgaggaacgccacagcggcaatgaagaatcaggtcgcccggtttaacgacctccgcttcgtggggagaagcggaaggggcaaaagttttaccctgactataacagtattcaccaatcctccacaagttgctacgtatcaccgggccatcaagattactgtggatggcccgcgcgaaccccgaagacataggcagaagctggacgatcagaccaaacctgggtccctctcttttagcgagcggttatccgagctggaacagcttcgtcgcacagcaatgagagtctcaccacaccatcccgctcctactccaaaccccagggccagtttgaatcacagcaccgcgttcaacccgcaacctcagtctcagatgcaggaggtgggattttgccacgtggcccaagtcggtctgaagctactcggctgaggactagtccctgttcccagagcccacttttttttctttttttgaaataaaatagcctgtctttcagatctaaaaaaaaaaaaaaaaaaaaaaaaaaaaaaaaaaaaaaaaaaaaaaaaaaaaaaaaaaaaaaaaaaaaaaaaaaaaaaaaaaaaaaaaaaaaaaaaaaaagaatt

SEQ ID NO: 1396 - RNA, 2731 nt, synthetic construct
  misc_feature 1..2731: note = Artificial____RUNX1(1-241)_V_RUNX1T1b(22-604) mRNA opt3
  source 1..2731: mol_type = other RNA
aggagagtcccgcagtcggcgtccagcggctctgcttgttcgtgtgtgtgtcgttgcaggccttattcaagcttaccatgagaatccccgtggacgccagcacctccaggcggttcacacctccatctactgctctgtcaccgggcaagatgagtgaggcactcccccttggggcccctgatgcgggagctgccctggcaggtaaattgcgcagcggcgaccgatccatggtcgaagttttagccgatcacccaggggagctggtgcgtacggactctcccaactttctatgctcggtactccctacccattggagatgtaataagacactgccaattgctttcaaagtggtcgcacttggagatgtgcccgacggcactctggttaccgtgatggccggtaacgatgaaaattactcagctgagttgaggaacgccacagcggcaatgaagaatcaggtcgcccggtttaacgacctccgcttcgtggggagaagcggaaggggcaaaagttttaccctgactataacagtattcaccaatcctccacaagttgctacgtatcaccgggccatcaagattactgtggatggcccgcgcgaaccccgaagacataggcagaagctggacgatcagaccaaacctgggtccctctcttttagcgagcggttatccgagctggaacagcttcgtcgcacagcaatgagagtctcaccacaccatcccgctcctactccaaaccccagggccagtttgaatcacagcaccgcgttcaacccgcaacctcagtctcagatgcaagtgggacccgagaagcgggtgccagccatgcctggttcccccgtcgaagttaaaatccagtcacgaagcagtccacccacaatgcctccactgccgcccattaatcctggcgggccacgccccgtgtcttttacccctacggcactatccaacggaatcaatcacagcccacccactctcaacggcgctccgtcgcctccacagagattctctaatggtcccgcctcctcaacaagtagcgctctgaccaaccagcagcttcctgccacttgcggggcaaggcaactgtccaagttgaaacggtttctcacaaccctgcagcagttcggaaacgacatatctcccgagatcggcgagaaggtacgcacgttagtgctggccctcgtcaatagcaccgtgacaattgaagagtttcattgtaagctacaagaagctactaacttcccactgagacctttcgttatcccctttttgaaagcgaatctaccactgctccagagggagctgcttcactgcgcacgtgccgctaagcagaccccgtcacagtacctggcccaacatgaacacttgctcctgaacacaagtattgcatcccctgccgatagctctgagttactgatggaggtgcacggcaatgggaaacggccctcaccagaacgaagagaggaaaacagtttcgacagggacactatcgctcccgagcctccagccaagcgcgtctgtaccataagccccgcacctcggcattccccggcgctaacagtgccactcatgaatcccggaggtcagtttcaccctaccccaccccctctgcagcattatactcttgaagatattgctacgtctcacttgtacagagagccgaacaaaatgctggagcatagggaagtacgcgaccgacaccactcgctcggcctgaatgggggatatcaggatgagcttgttgaccatcggctgacagaacgtgagtgggccgatgaatggaagcacttggaccatgcactcaactgcatcatggagatggtggagaaaaccagaaggagcatggccgtcctgcgccggtgtcaagaatccgatagagaggaattaaattactggaagaggcgatataacgagaatactgagctgcgcaagaccggcacagaacttgtgtcacggcagcacagtcccggttctgctgacagcctctccaacgattcacagagagagttcaatagcaggccagggaccggctacgtccctgtggaattttggaaaaagactgaggaagccgttaacaaagtgaagattcaggcaatgtctgaggtacaaaaagctgtcgccgaggcggaacagaaggccttcgaggtgatcgctacagaacgtgcacgcatggagcagacgatcgccgacgttaagcggcaggctgccgaagatgcatttctggtgattaacgagcaagaggaatccaccgagaattgctggaactgtggaagaaaagcgagtgaaacttgcagcggctgtaatatagccaggtactgcgggtctttctgccagcacaaggactgggagcgacatcaccggctttgtggacagaacttgcatggtcaatcaccccacggccaggggcgcccactgctccctgtcggaagaggctccagtgctaggagcgccgactgctcggtgccctccccagcactggataaaacatctgctaccacaagccggtcaagtactccggcctccgtaaccgcaatcgacacgaatggtttatgaggactagtccctgttcccagagcccacttttttttctttttttgaaataaaatagcctgtctttcagatctaaaaaaaaaaaaaaaaaaaaaaaaaaaaaaaaaaaaaaaaaaaaaaaaaaaaaaaaaaaaaaaaaaaaaaaaaaaaaaaaaaaaaaaaaaaaaaaaaaaagaatt

SEQ ID NO: 1397 - RNA, 2731 nt, synthetic construct
  misc_feature 1..2731: note = Artificial____RUNX1(1-241)_I_RUNX1T1b(22-604) mRNA opt3
  source 1..2731: mol_type = other RNA
aggagagtcccgcagtcggcgtccagcggctctgcttgttcgtgtgtgtgtcgttgcaggccttattcaagcttaccatgagaatccccgtggacgccagcacctccaggcggttcacacctccatctactgctctgtcaccgggcaagatgagtgaggcactcccccttggggcccctgatgcgggagctgccctggcaggtaaattgcgcagcggcgaccgatccatggtcgaagttttagccgatcacccaggggagctggtgcgtacggactctcccaactttctatgctcggtactccctacccattggagatgtaataagacactgccaattgctttcaaagtggtcgcacttggagatgtgcccgacggcactctggttaccgtgatggccggtaacgatgaaaattactcagctgagttgaggaacgccacagcggcaatgaagaatcaggtcgcccggtttaacgacctccgcttcgtggggagaagcggaaggggcaaaagttttaccctgactataacagtattcaccaatcctccacaagttgctacgtatcaccgggccatcaagattactgtggatggcccgcgcgaaccccgaagacataggcagaagctggacgatcagaccaaacctgggtccctctcttttagcgagcggttatccgagctggaacagcttcgtcgcacagcaatgagagtctcaccacaccatcccgctcctactccaaaccccagggccagtttgaatcacagcaccgcgttcaacccgcaacctcagtctcagatgcagatcggacccgagaagcgggtgccagccatgcctggttcccccgtggaagtcaaaattcaatcacgaagcagtccacccacaatgcctccactgccgcccatcaatcctggcgggccacgccccgtttcttttacccctacggcactatccaacggaataaatcacagcccacccactctcaacggcgctccgtcgcctccacagagattctctaatggtcccgcctcctcaacaagtagcgctctgaccaaccagcagcttcctgccacttgcggggcaaggcaactgtccaagttgaaacggtttctcacaaccctgcagcagttcggaaacgacatctctcccgagattggcgagaaggtgcgcacgttagtactggccctcgtgaatagcaccgtcacaatcgaagagtttcattgtaagctacaagaagctactaacttcccactgagacctttcgtgattccctttttgaaagcgaatctaccactgctccagagggagctgcttcactgcgcacgtgccgctaagcagaccccgtcacagtacctggcccaacatgaacacttgctcctgaacacaagtatcgcatcccctgccgatagctctgagttactgatggaggttcacggcaatgggaaacggccctcaccagaacgaagagaggaaaacagtttcgacagggacactatagctcccgagcctccagccaagcgcgtgtgtaccattagccccgcacctcggcattccccggcgctaacagtcccactcatgaatcccggaggtcagtttcaccctaccccaccccctctgcagcattatactcttgaagatatcgctacgtctcacttgtacagagagccgaacaaaatgctggagcatagggaagtgcgcgaccgacaccactcgctcggcctgaatgggggatatcaggatgagcttgtagaccatcggctgacagaacgtgagtgggccgatgaatggaagcacttggaccatgcactcaactgcattatggagatggttgagaaaaccagaaggagcatggccgtgctgcgccggtgtcaagaatccgatagagaggaattaaattactggaagaggcgatataacgagaatactgagctgcgcaagaccggcacagaacttgtctcacggcagcacagtcccggttctgctgacagcctctccaacgattcacagagagagttcaatagcaggccagggaccggctacgtgcctgtcgaattttggaaaaagactgaggaagccgtgaacaaagttaagatccaggcaatgtctgaggtgcaaaaagctgtagccgaggcggaacagaaggccttcgaggtcatcgctacagaacgtgcacgcatggagcagacgattgccgacgtgaagcggcaggctgccgaagatgcatttctggttataaacgagcaagaggaatccaccgagaattgctggaactgtggaagaaaagcgagtgaaacttgcagcggctgtaatatcgccaggtactgcgggtctttctgccagcacaaggactgggagcgacatcaccggctttgtggacagaacttgcatggtcaatcaccccacggccaggggcgcccactgctccctgtgggaagaggctccagtgctaggagcgccgactgctcggtcccctccccagcactggataaaacatctgctaccacaagccggtcaagtactccggcctccgtgaccgcaattgacacgaatggtttatgaggactagtccctgttcccagagcccacttttttttctttttttgaaataaaatagcctgtctttcagatctaaaaaaaaaaaaaaaaaaaaaaaaaaaaaaaaaaaaaaaaaaaaaaaaaaaaaaaaaaaaaaaaaaaaaaaaaaaaaaaaaaaaaaaaaaaaaaaaaaaagaatt

SEQ ID NO: 1398 - RNA, 1615 nt, synthetic construct
  misc_feature 1..1615: note = Homo sapiens__Q01196-1__RUNX1(K83E_R174Q) mRNA opt4
  source 1..1615: mol_type = other RNA
aggagagtcccgcagtcggcgtccagcggctctgcttgttcgtgtgtgtgtcgttgcaggccttattcaagcttaccatgagaatccccgtggacgccagcaccagcagaagattcaccccccccagcaccgccctgagccccggcaagatgagcgaggccctgcccctgggcgcccccgacgccggcgccgccctggccggcaagctgagaagcggcgacagaagcatggtggaggtgctggccgaccaccccggcgagctggtgagaaccgacagccccaacttcctgtgcagcgtgctgcccacccactggagatgcaacgagaccctgcccatcgccttcaaggtggtggccctgggcgacgtgcccgacggcaccctggtgaccgtgatggccggcaacgacgagaactacagcgccgagctgagaaacgccaccgccgccatgaagaaccaggtggccagattcaacgacctgagattcgtgggcagaagcggcagaggcaagagcttcaccctgaccatcaccgtgttcaccaaccccccccaggtggccacctaccacagagccatcaagatcaccgtggacggcccccaggagcccagaagacacagacagaagctggacgaccagaccaagcccggcagcctgagcttcagcgagagactgagcgagctggagcagctgagaagaaccgccatgagagtgagcccccaccaccccgcccccacccccaaccccagagccagcctgaaccacagcaccgccttcaacccccagccccagagccagatgcaggacaccagacagatccagcccagccccccctggagctacgaccagagctaccagtacctgggcagcatcgccagccccagcgtgcaccccgccacccccatcagccccggcagagccagcggcatgaccaccctgagcgccgagctgagcagcagactgagcaccgcccccgacctgaccgccttcagcgaccccagacagttccccgccctgcccagcatcagcgaccccagaatgcactaccccggcgccttcacctacagccccacccccgtgaccagcggcatcggcatcggcatgagcgccatgggcagcgccaccagataccacacctacctgccccccccctaccccggcagcagccaggcccagggcggccccttccaggccagcagccccagctaccacctgtactacggcgccagcgccggcagctaccagttcagcatggtgggcggcgagagaagcccccccagaatcctgcccccctgcaccaacgccagcaccggcagcgccctgctgaaccccagcctgcccaaccagagcgacgtggtggaggccgagggcagccacagcaacagccccaccaacatggcccccagcgccagactggaggaggccgtgtggagaccctactgaggactagtccctgttcccagagcccacttttttttctttttttgaaataaaatagcctgtctttcagatctaaaaaaaaaaaaaaaaaaaaaaaaaaaaaaaaaaaaaaaaaaaaaaaaaaaaaaaaaaaaaaaaaaaaaaaaaaaaaaaaaaaaaaaaaaaaaaaaaaaagaatt

SEQ ID NO: 1399 - RNA, 2089 nt, synthetic construct
  misc_feature 1..2089: note = Homo sapiens____CBFbeta(1-165)_SMMHC(1527-1972) mRNA opt4
  source 1..2089: mol_type = other RNA
aggagagtcccgcagtcggcgtccagcggctctgcttgttcgtgtgtgtgtcgttgcaggccttattcaagcttaccatgcccagagtggtgcccgaccagagaagcaagttcgagaacgaggagttcttcagaaagctgagcagagagtgcgagatcaagtacaccggcttcagagacagaccccacgaggagagacaggccagattccagaacgcctgcagagacggcagaagcgagatcgccttcgtggccaccggcaccaacctgagcctgcagttcttccccgccagctggcagggcgagcagagacagacccccagcagagagtacgtggacctggagagagaggccggcaaggtgtacctgaaggcccccatgatcctgaacggcgtgtgcgtgatctggaagggctggatcgacctgcagagactggacggcatgggctgcctggagttcgacgaggagagagcccagcaggaggacgccctggcccagcaggccttcgaggaggccagaagaagaaccagagagttcgaggacagagacagaagccacagagaggagatggaggtgcacgagctggagaagagcaagagagccctggagacccagatggaggagatgaagacccagctggaggagctggaggacgagctgcaggccaccgaggacgccaagctgagactggaggtgaacatgcaggccctgaagggccagttcgagagagacctgcaggccagagacgagcagaacgaggagaagagaagacagctgcagagacagctgcacgagtacgagaccgagctggaggacgagagaaagcagagagccctggccgccgccgccaagaagaagctggagggcgacctgaaggacctggagctgcaggccgacagcgccatcaagggcagagaggaggccatcaagcagctgagaaagctgcaggcccagatgaaggacttccagagagagctggaggacgccagagccagcagagacgagatcttcgccaccgccaaggagaacgagaagaaggccaagagcctggaggccgacctgatgcagctgcaggaggacctggccgccgccgagagagccagaaagcaggccgacctggagaaggaggagctggccgaggagctggccagcagcctgagcggcagaaacgccctgcaggacgagaagagaagactggaggccagaatcgcccagctggaggaggagctggaggaggagcagggcaacatggaggccatgagcgacagagtgagaaaggccacccagcaggccgagcagctgagcaacgagctggccaccgagagaagcaccgcccagaagaacgagagcgccagacagcagctggagagacagaacaaggagctgagaagcaagctgcacgagatggagggcgccgtgaagagcaagttcaagagcaccatcgccgccctggaggccaagatcgcccagctggaggagcaggtggagcaggaggccagagagaagcaggccgccaccaagagcctgaagcagaaggacaagaagctgaaggagatcctgctgcaggtggaggacgagagaaagatggccgagcagtacaaggagcaggccgagaagggcaacgccagagtgaagcagctgaagagacagctggaggaggccgaggaggagagccagagaatcaacgccaacagaagaaagctgcagagagagctggacgaggccaccgagagcaacgaggccatgggcagagaggtgaacgccctgaagagcaagctgagaagaggcaacgagaccagcttcgtgcccagcagaagaagcggcggcagaagagtgatcgagaacgccgacggcagcgaggaggagaccgacaccagagacgccgacttcaacggcaccaaggccagcgagtgaggactagtccctgttcccagagcccacttttttttctttttttgaaataaaatagcctgtctttcagatctaaaaaaaaaaaaaaaaaaaaaaaaaaaaaaaaaaaaaaaaaaaaaaaaaaaaaaaaaaaaaaaaaaaaaaaaaaaaaaaaaaaaaaaaaaaaaaaaaaaagaatt

SEQ ID NO: 1400 - RNA, 1804 nt, synthetic construct
  misc_feature 1..1804: note = Artificial____CBFbeta(1-165)_SMMHC(1527-1877) mRNA opt4
  source 1..1804: mol_type = other RNA
aggagagtcccgcagtcggcgtccagcggctctgcttgttcgtgtgtgtgtcgttgcaggccttattcaagcttaccatgcccagagtggtgcccgaccagagaagcaagttcgagaacgaggagttcttcagaaagctgagcagagagtgcgagatcaagtacaccggcttcagagacagaccccacgaggagagacaggccagattccagaacgcctgcagagacggcagaagcgagatcgccttcgtggccaccggcaccaacctgagcctgcagttcttccccgccagctggcagggcgagcagagacagacccccagcagagagtacgtggacctggagagagaggccggcaaggtgtacctgaaggcccccatgatcctgaacggcgtgtgcgtgatctggaagggctggatcgacctgcagagactggacggcatgggctgcctggagttcgacgaggagagagcccagcaggaggacgccctggcccagcaggccttcgaggaggccagaagaagaaccagagagttcgaggacagagacagaagccacagagaggagatggaggtgcacgagctggagaagagcaagagagccctggagacccagatggaggagatgaagacccagctggaggagctggaggacgagctgcaggccaccgaggacgccaagctgagactggaggtgaacatgcaggccctgaagggccagttcgagagagacctgcaggccagagacgagcagaacgaggagaagagaagacagctgcagagacagctgcacgagtacgagaccgagctggaggacgagagaaagcagagagccctggccgccgccgccaagaagaagctggagggcgacctgaaggacctggagctgcaggccgacagcgccatcaagggcagagaggaggccatcaagcagctgagaaagctgcaggcccagatgaaggacttccagagagagctggaggacgccagagccagcagagacgagatcttcgccaccgccaaggagaacgagaagaaggccaagagcctggaggccgacctgatgcagctgcaggaggacctggccgccgccgagagagccagaaagcaggccgacctggagaaggaggagctggccgaggagctggccagcagcctgagcggcagaaacgccctgcaggacgagaagagaagactggaggccagaatcgcccagctggaggaggagctggaggaggagcagggcaacatggaggccatgagcgacagagtgagaaaggccacccagcaggccgagcagctgagcaacgagctggccaccgagagaagcaccgcccagaagaacgagagcgccagacagcagctggagagacagaacaaggagctgagaagcaagctgcacgagatggagggcgccgtgaagagcaagttcaagagcaccatcgccgccctggaggccaagatcgcccagctggaggagcaggtggagcaggaggccagagagaagcaggccgccaccaagagcctgaagcagaaggacaagaagctgaaggagatcctgctgcaggtggaggacgagagaaagatggccgagcagtacaaggagcaggccgagaagggcaacgcctgaggactagtccctgttcccagagcccacttttttttctttttttgaaataaaatagcctgtctttcagatctaaaaaaaaaaaaaaaaaaaaaaaaaaaaaaaaaaaaaaaaaaaaaaaaaaaaaaaaaaaaaaaaaaaaaaaaaaaaaaaaaaaaaaaaaaaaaaaaaaaagaatt

SEQ ID NO: 1401 - RNA, 865 nt, synthetic construct
  misc_feature 1..865: note = Artificial____CBFbeta(1-165)_Linker_Lifeact mRNA opt4
  source 1..865: mol_type = other RNA
aggagagtcccgcagtcggcgtccagcggctctgcttgttcgtgtgtgtgtcgttgcaggccttattcaagcttaccatgcccagagtggtgcccgaccagagaagcaagttcgagaacgaggagttcttcagaaagctgagcagagagtgcgagatcaagtacaccggcttcagagacagaccccacgaggagagacaggccagattccagaacgcctgcagagacggcagaagcgagatcgccttcgtggccaccggcaccaacctgagcctgcagttcttccccgccagctggcagggcgagcagagacagacccccagcagagagtacgtggacctggagagagaggccggcaaggtgtacctgaaggcccccatgatcctgaacggcgtgtgcgtgatctggaagggctggatcgacctgcagagactggacggcatgggctgcctggagttcgacgaggagagagcccagcaggaggacgccctggcccagcaggccttcgaggaggccagaagaagaaccagagagttcgaggacagagacagaagccacagagaggagatggagggcggcagcggcggcagcggcggcagcggcggcagcggcggcggcggcgtggccgacctgatcaagaagttcgagagcatcagcaaggaggagggcgacccccccgtggccacctgaggactagtccctgttcccagagcccacttttttttctttttttgaaataaaatagcctgtctttcagatctaaaaaaaaaaaaaaaaaaaaaaaaaaaaaaaaaaaaaaaaaaaaaaaaaaaaaaaaaaaaaaaaaaaaaaaaaaaaaaaaaaaaaaaaaaaaaaaaaaaagaatt

SEQ ID NO: 1402 - RNA, 832 nt, synthetic construct
  misc_feature 1..832: note = Artificial____CBFbeta(1-165)_HIF1alpha(549-575) mRNA opt4
  source 1..832: mol_type = other RNA
aggagagtcccgcagtcggcgtccagcggctctgcttgttcgtgtgtgtgtcgttgcaggccttattcaagcttaccatgcccagagtggtgcccgaccagagaagcaagttcgagaacgaggagttcttcagaaagctgagcagagagtgcgagatcaagtacaccggcttcagagacagaccccacgaggagagacaggccagattccagaacgcctgcagagacggcagaagcgagatcgccttcgtggccaccggcaccaacctgagcctgcagttcttccccgccagctggcagggcgagcagagacagacccccagcagagagtacgtggacctggagagagaggccggcaaggtgtacctgaaggcccccatgatcctgaacggcgtgtgcgtgatctggaagggctggatcgacctgcagagactggacggcatgggctgcctggagttcgacgaggagagagcccagcaggaggacgccctggcccagcaggccttcgaggaggccagaagaagaaccagagagttcgaggacagagacagaagccacagagaggagatggagcccttcagcacccaggacaccgacctggacctggagatgctggccccctacatccccatggacgacgacttccagctgagatgaggactagtccctgttcccagagcccacttttttttctttttttgaaataaaatagcctgtctttcagatctaaaaaaaaaaaaaaaaaaaaaaaaaaaaaaaaaaaaaaaaaaaaaaaaaaaaaaaaaaaaaaaaaaaaaaaaaaaaaaaaaaaaaaaaaaaaaaaaaaaagaatt

SEQ ID NO: 1403 - RNA, 877 nt, synthetic construct
  misc_feature 1..877: note Artificial____CBFbeta(1-165)_Linker_HIF1alpha(549-575) mRNA opt4
  source 1..877: mol_type = other RNA
aggagagtcccgcagtcggcgtccagcggctctgcttgttcgtgtgtgtgtcgttgcaggccttattcaagcttaccatgcccagagtggtgcccgaccagagaagcaagttcgagaacgaggagttcttcagaaagctgagcagagagtgcgagatcaagtacaccggcttcagagacagaccccacgaggagagacaggccagattccagaacgcctgcagagacggcagaagcgagatcgccttcgtggccaccggcaccaacctgagcctgcagttcttccccgccagctggcagggcgagcagagacagacccccagcagagagtacgtggacctggagagagaggccggcaaggtgtacctgaaggcccccatgatcctgaacggcgtgtgcgtgatctggaagggctggatcgacctgcagagactggacggcatgggctgcctggagttcgacgaggagagagcccagcaggaggacgccctggcccagcaggccttcgaggaggccagaagaagaaccagagagttcgaggacagagacagaagccacagagaggagatggagggcggcagcggcggcagcggcggcagcggcggcagcggcggcggccccttcagcacccaggacaccgacctggacctggagatgctggccccctacatccccatggacgacgacttccagctgagatgaggactagtccctgttcccagagcccacttttttttctttttttgaaataaaatagcctgtctttcagatctaaaaaaaaaaaaaaaaaaaaaaaaaaaaaaaaaaaaaaaaaaaaaaaaaaaaaaaaaaaaaaaaaaaaaaaaaaaaaaaaaaaaaaaaaaaaaaaaaaaagaatt

SEQ ID NO: 1404 - RNA, 2512 nt, synthetic construct
  misc_feature 1..2512: note = Artificial____RUNX1(1-177)_N_RUNX1T1a(31-604) mRNA opt4
  source 1..2512: mol_type = other RNA
aggagagtcccgcagtcggcgtccagcggctctgcttgttcgtgtgtgtgtcgttgcaggccttattcaagcttaccatgagaatccccgtggacgccagcaccagcagaagattcaccccccccagcaccgccctgagccccggcaagatgagcgaggccctgcccctgggcgcccccgacgccggcgccgccctggccggcaagctgagaagcggcgacagaagcatggtggaggtgctggccgaccaccccggcgagctggtgagaaccgacagccccaacttcctgtgcagcgtgctgcccacccactggagatgcaacaagaccctgcccatcgccttcaaggtggtggccctgggcgacgtgcccgacggcaccctggtgaccgtgatggccggcaacgacgagaactacagcgccgagctgagaaacgccaccgccgccatgaagaaccaggtggccagattcaacgacctgagattcgtgggcagaagcggcagaggcaagagcttcaccctgaccatcaccgtgttcaccaaccccccccaggtggccacctaccacagagccatcaagatcaccgtggacggccccagagagcccagaaacagaaccgagaagcacagcaccatgcccgacagccccgtggacgtgaagacccagagcagactgaccccccccaccatgccccccccccccaccacccagggcgcccccagaaccagcagcttcacccccaccaccctgaccaacggcaccagccacagccccaccgccctgaacggcgcccccagcccccccaacggcttcagcaacggccccagcagcagcagcagcagcagcctggccaaccagcagctgccccccgcctgcggcgccagacagctgagcaagctgaagagattcctgaccaccctgcagcagttcggcaacgacatcagccccgagatcggcgagagagtgagaaccctggtgctgggcctggtgaacagcaccctgaccatcgaggagttccacagcaagctgcaggaggccaccaacttccccctgagacccttcgtgatccccttcctgaaggccaacctgcccctgctgcagagagagctgctgcactgcgccagactggccaagcagaaccccgcccagtacctggcccagcacgagcagctgctgctggacgccagcaccaccagccccgtggacagcagcgagctgctgctggacgtgaacgagaacggcaagagaagaacccccgacagaaccaaggagaacggcttcgacagagagcccctgcacagcgagcaccccagcaagagaccctgcaccatcagccccggccagagatacagccccaacaacggcctgagctaccagcccaacggcctgccccaccccacccccccccccccccagcactacagactggacgacatggccatcgcccaccactacagagacagctacagacaccccagccacagagacctgagagacagaaacagacccatgggcctgcacggcaccagacaggaggagatgatcgaccacagactgaccgacagagagtgggccgaggagtggaagcacctggaccacctgctgaactgcatcatggacatggtggagaagaccagaagaagcctgaccgtgctgagaagatgccaggaggccgacagagaggagctgaactactggatcagaagatacagcgacgccgaggacctgaagaagggcggcggcagcagcagcagccacagcagacagcagagccccgtgaaccccgaccccgtggccctggacgcccacagagagttcctgcacagacccgccagcggctacgtgcccgaggagatctggaagaaggccgaggaggccgtgaacgaggtgaagagacaggccatgaccgagctgcagaaggccgtgagcgaggccgagagaaaggcccacgacatgatcaccaccgagagagccaagatggagagaaccgtggccgaggccaagagacaggccgccgaggacgccctggccgtgatcaaccagcaggaggacagcagcgagagctgctggaactgcggcagaaaggccagcgagacctgcagcggctgcaacaccgccagatactgcggcagcttctgccagcacaaggactgggagaagcaccaccacatctgcggccagaccctgcaggcccagcagcagggcgacacccccgccgtgagcagcagcgtgacccccaacagcggcgccggcagccccatggacaccccccccgccgccacccccagaagcaccacccccggcacccccagcaccatcgagaccacccccagatgaggactagtccctgttcccagagcccacttttttttctttttttgaaataaaatagcctgtctttcagatctaaaaaaaaaaaaaaaaaaaaaaaaaaaaaaaaaaaaaaaaaaaaaaaaaaaaaaaaaaaaaaaaaaaaaaaaaaaaaaaaaaaaaaaaaaaaaaaaaaaagaatt

SEQ ID NO: 1405 - RNA, 1027 nt, synthetic construct
  misc_feature 1..1027: note = Artificial____RUNX1(1-241)_RUNX1T1b(short) mRNA opt4
  source 1..1027: mol_type = other RNA
aggagagtcccgcagtcggcgtccagcggctctgcttgttcgtgtgtgtgtcgttgcaggccttattcaagcttaccatgagaatccccgtggacgccagcaccagcagaagattcaccccccccagcaccgccctgagccccggcaagatgagcgaggccctgcccctgggcgcccccgacgccggcgccgccctggccggcaagctgagaagcggcgacagaagcatggtggaggtgctggccgaccaccccggcgagctggtgagaaccgacagccccaacttcctgtgcagcgtgctgcccacccactggagatgcaacaagaccctgcccatcgccttcaaggtggtggccctgggcgacgtgcccgacggcaccctggtgaccgtgatggccggcaacgacgagaactacagcgccgagctgagaaacgccaccgccgccatgaagaaccaggtggccagattcaacgacctgagattcgtgggcagaagcggcagaggcaagagcttcaccctgaccatcaccgtgttcaccaaccccccccaggtggccacctaccacagagccatcaagatcaccgtggacggccccagagagcccagaagacacagacagaagctggacgaccagaccaagcccggcagcctgagcttcagcgagagactgagcgagctggagcagctgagaagaaccgccatgagagtgagcccccaccaccccgcccccacccccaaccccagagccagcctgaaccacagcaccgccttcaacccccagccccagagccagatgcaggaggtgggcttctgccacgtggcccaggtgggcctgaagctgctgggctgaggactagtccctgttcccagagcccacttttttttctttttttgaaataaaatagcctgtctttcagatctaaaaaaaaaaaaaaaaaaaaaaaaaaaaaaaaaaaaaaaaaaaaaaaaaaaaaaaaaaaaaaaaaaaaaaaaaaaaaaaaaaaaaaaaaaaaaaaaaaaagaatt

SEQ ID NO: 1406 - RNA, 2731 nt, synthetic construct
  misc_feature 1..2731: note = Artificial____RUNX1(1-241)_V_RUNX1T1b(22-604) mRNA opt4
  source 1..2731: mol_type = other RNA
aggagagtcccgcagtcggcgtccagcggctctgcttgttcgtgtgtgtgtcgttgcaggccttattcaagcttaccatgagaatccccgtggacgccagcaccagcagaagattcaccccccccagcaccgccctgagccccggcaagatgagcgaggccctgcccctgggcgcccccgacgccggcgccgccctggccggcaagctgagaagcggcgacagaagcatggtggaggtgctggccgaccaccccggcgagctggtgagaaccgacagccccaacttcctgtgcagcgtgctgcccacccactggagatgcaacaagaccctgcccatcgccttcaaggtggtggccctgggcgacgtgcccgacggcaccctggtgaccgtgatggccggcaacgacgagaactacagcgccgagctgagaaacgccaccgccgccatgaagaaccaggtggccagattcaacgacctgagattcgtgggcagaagcggcagaggcaagagcttcaccctgaccatcaccgtgttcaccaaccccccccaggtggccacctaccacagagccatcaagatcaccgtggacggccccagagagcccagaagacacagacagaagctggacgaccagaccaagcccggcagcctgagcttcagcgagagactgagcgagctggagcagctgagaagaaccgccatgagagtgagcccccaccaccccgcccccacccccaaccccagagccagcctgaaccacagcaccgccttcaacccccagccccagagccagatgcaggtgggccccgagaagagagtgcccgccatgcccggcagccccgtggaggtgaagatccagagcagaagcagcccccccaccatgccccccctgccccccatcaaccccggcggccccagacccgtgagcttcacccccaccgccctgagcaacggcatcaaccacagcccccccaccctgaacggcgcccccagccccccccagagattcagcaacggccccgccagcagcaccagcagcgccctgaccaaccagcagctgcccgccacctgcggcgccagacagctgagcaagctgaagagattcctgaccaccctgcagcagttcggcaacgacatcagccccgagatcggcgagaaggtgagaaccctggtgctggccctggtgaacagcaccgtgaccatcgaggagttccactgcaagctgcaggaggccaccaacttccccctgagacccttcgtgatccccttcctgaaggccaacctgcccctgctgcagagagagctgctgcactgcgccagagccgccaagcagacccccagccagtacctggcccagcacgagcacctgctgctgaacaccagcatcgccagccccgccgacagcagcgagctgctgatggaggtgcacggcaacggcaagagacccagccccgagagaagagaggagaacagcttcgacagagacaccatcgcccccgagccccccgccaagagagtgtgcaccatcagccccgcccccagacacagccccgccctgaccgtgcccctgatgaaccccggcggccagttccaccccacccccccccccctgcagcactacaccctggaggacatcgccaccagccacctgtacagagagcccaacaagatgctggagcacagagaggtgagagacagacaccacagcctgggcctgaacggcggctaccaggacgagctggtggaccacagactgaccgagagagagtgggccgacgagtggaagcacctggaccacgccctgaactgcatcatggagatggtggagaagaccagaagaagcatggccgtgctgagaagatgccaggagagcgacagagaggagctgaactactggaagagaagatacaacgagaacaccgagctgagaaagaccggcaccgagctggtgagcagacagcacagccccggcagcgccgacagcctgagcaacgacagccagagagagttcaacagcagacccggcaccggctacgtgcccgtggagttctggaagaagaccgaggaggccgtgaacaaggtgaagatccaggccatgagcgaggtgcagaaggccgtggccgaggccgagcagaaggccttcgaggtgatcgccaccgagagagccagaatggagcagaccatcgccgacgtgaagagacaggccgccgaggacgccttcctggtgatcaacgagcaggaggagagcaccgagaactgctggaactgcggcagaaaggccagcgagacctgcagcggctgcaacatcgccagatactgcggcagcttctgccagcacaaggactgggagagacaccacagactgtgcggccagaacctgcacggccagagcccccacggccagggcagacccctgctgcccgtgggcagaggcagcagcgccagaagcgccgactgcagcgtgcccagccccgccctggacaagaccagcgccaccaccagcagaagcagcacccccgccagcgtgaccgccatcgacaccaacggcctgtgaggactagtccctgttcccagagcccacttttttttctttttttgaaataaaatagcctgtctttcagatctaaaaaaaaaaaaaaaaaaaaaaaaaaaaaaaaaaaaaaaaaaaaaaaaaaaaaaaaaaaaaaaaaaaaaaaaaaaaaaaaaaaaaaaaaaaaaaaaaaaagaatt

SEQ ID NO: 1407 - RNA, 2731 nt, synthetic construct
  misc_feature 1..2731: note = Artificial____RUNX1(1-241)_I_RUNX1T1b(22-604) mRNA opt4
  source 1..2731: mol_type = other RNA
aggagagtcccgcagtcggcgtccagcggctctgcttgttcgtgtgtgtgtcgttgcaggccttattcaagcttaccatgagaatccccgtggacgccagcaccagcagaagattcaccccccccagcaccgccctgagccccggcaagatgagcgaggccctgcccctgggcgcccccgacgccggcgccgccctggccggcaagctgagaagcggcgacagaagcatggtggaggtgctggccgaccaccccggcgagctggtgagaaccgacagccccaacttcctgtgcagcgtgctgcccacccactggagatgcaacaagaccctgcccatcgccttcaaggtggtggccctgggcgacgtgcccgacggcaccctggtgaccgtgatggccggcaacgacgagaactacagcgccgagctgagaaacgccaccgccgccatgaagaaccaggtggccagattcaacgacctgagattcgtgggcagaagcggcagaggcaagagcttcaccctgaccatcaccgtgttcaccaaccccccccaggtggccacctaccacagagccatcaagatcaccgtggacggccccagagagcccagaagacacagacagaagctggacgaccagaccaagcccggcagcctgagcttcagcgagagactgagcgagctggagcagctgagaagaaccgccatgagagtgagcccccaccaccccgcccccacccccaaccccagagccagcctgaaccacagcaccgccttcaacccccagccccagagccagatgcagatcggccccgagaagagagtgcccgccatgcccggcagccccgtggaggtgaagatccagagcagaagcagcccccccaccatgccccccctgccccccatcaaccccggcggccccagacccgtgagcttcacccccaccgccctgagcaacggcatcaaccacagcccccccaccctgaacggcgcccccagccccccccagagattcagcaacggccccgccagcagcaccagcagcgccctgaccaaccagcagctgcccgccacctgcggcgccagacagctgagcaagctgaagagattcctgaccaccctgcagcagttcggcaacgacatcagccccgagatcggcgagaaggtgagaaccctggtgctggccctggtgaacagcaccgtgaccatcgaggagttccactgcaagctgcaggaggccaccaacttccccctgagacccttcgtgatccccttcctgaaggccaacctgcccctgctgcagagagagctgctgcactgcgccagagccgccaagcagacccccagccagtacctggcccagcacgagcacctgctgctgaacaccagcatcgccagccccgccgacagcagcgagctgctgatggaggtgcacggcaacggcaagagacccagccccgagagaagagaggagaacagcttcgacagagacaccatcgcccccgagccccccgccaagagagtgtgcaccatcagccccgcccccagacacagccccgccctgaccgtgcccctgatgaaccccggcggccagttccaccccacccccccccccctgcagcactacaccctggaggacatcgccaccagccacctgtacagagagcccaacaagatgctggagcacagagaggtgagagacagacaccacagcctgggcctgaacggcggctaccaggacgagctggtggaccacagactgaccgagagagagtgggccgacgagtggaagcacctggaccacgccctgaactgcatcatggagatggtggagaagaccagaagaagcatggccgtgctgagaagatgccaggagagcgacagagaggagctgaactactggaagagaagatacaacgagaacaccgagctgagaaagaccggcaccgagctggtgagcagacagcacagccccggcagcgccgacagcctgagcaacgacagccagagagagttcaacagcagacccggcaccggctacgtgcccgtggagttctggaagaagaccgaggaggccgtgaacaaggtgaagatccaggccatgagcgaggtgcagaaggccgtggccgaggccgagcagaaggccttcgaggtgatcgccaccgagagagccagaatggagcagaccatcgccgacgtgaagagacaggccgccgaggacgccttcctggtgatcaacgagcaggaggagagcaccgagaactgctggaactgcggcagaaaggccagcgagacctgcagcggctgcaacatcgccagatactgcggcagcttctgccagcacaaggactgggagagacaccacagactgtgcggccagaacctgcacggccagagcccccacggccagggcagacccctgctgcccgtgggcagaggcagcagcgccagaagcgccgactgcagcgtgcccagccccgccctggacaagaccagcgccaccaccagcagaagcagcacccccgccagcgtgaccgccatcgacaccaacggcctgtgaggactagtccctgttcccagagcccacttttttttctttttttgaaataaaatagcctgtctttcagatctaaaaaaaaaaaaaaaaaaaaaaaaaaaaaaaaaaaaaaaaaaaaaaaaaaaaaaaaaaaaaaaaaaaaaaaaaaaaaaaaaaaaaaaaaaaaaaaaaaaagaatt

SEQ ID NO: 1408 - RNA, 1615 nt, synthetic construct
  misc_feature 1..1615: note = Homo sapiens__Q01196-1__RUNX1(K83E_R174Q) mRNA opt5
  source 1..1615: mol_type = other RNA
aggagagtcccgcagtcggcgtccagcggctctgcttgttcgtgtgtgtgtcgttgcaggccttattcaagcttaccatgagaatccccgtggacgccagcacctcccggcgcttcacacctccgtctacggctctgagccccggcaagatgtccgaggccctccctctgggggcgcccgatgctggagccgcccttgctggcaaactgagatctggggaccggagcatggtcgaagttctcgccgatcaccctggagagctggtgcgcaccgactcccccaactttctttgctctgtgctgcctacacattggagatgtaatgaaaccctcccgattgctttcaaggtcgtggccctgggcgatgttcccgacgggacactggtgaccgtcatggcgggaaacgatgagaattacagcgccgaactccggaacgctacagccgctatgaaaaatcaggtggcccgctttaacgacctgagattcgttggccggtccggccgcggaaagagctttacccttacgatcaccgtgttcacaaatcctccccaagtcgcgacctatcacagagccattaaaatcacagtggatgggcctcaggagccccggcgccatagacagaagctggacgatcagaccaagccgggctctctctcctttagcgagcggctgtctgaacttgagcaactgcgcagaacggctatgcgggtgtcccctcaccatcccgcccctacacccaaccccagagctagcctcaatcactctaccgccttcaaccctcagccgcagtcccagatgcaagacacacgccagattcagcccagccctccctggtcctacgatcagtcttatcaatacctggggagcatcgcctcccctagcgtccaccccgctaccccgatctctcctggacgggcgtccggcatgaccacactgagcgccgaactctctagcagactgtccacggctcccgaccttaccgccttttctgaccctcgccagttccccgccctgcctagcatttccgatccccggatgcattatccgggggcttttacatacagccctacccccgttacatctggaatcggcattggcatgtccgccatggggagcgcgaccagatatcacacgtacctgccccctccgtaccccggatcttcccaggctcaaggcgggcctttccaggccagctccccctcttatcatctctactatggagccagcgctggctcctaccagttttctatggtcgggggagagcgcagccctccccggatccttcctccctgcacaaatgcctccaccggcagcgctctgctcaacccgtctctgcctaatcagtccgacgtggtggaggccgaaggcagccactctaactcccccaccaatatggcgcctagcgccagactggaggaagctgtgtggcgcccctattgaggactagtccctgttcccagagcccacttttttttctttttttgaaataaaatagcctgtctttcagatctaaaaaaaaaaaaaaaaaaaaaaaaaaaaaaaaaaaaaaaaaaaaaaaaaaaaaaaaaaaaaaaaaaaaaaaaaaaaaaaaaaaaaaaaaaaaaaaaaaaagaatt

SEQ ID NO: 1409 - RNA, 2089 nt, synthetic construct
  misc_feature 1..2089: note = Homo sapiens____CBFbeta(1-165)_SMMHC(1527-1972) mRNA opt5
  source 1..2089: mol_type = other RNA
aggagagtcccgcagtcggcgtccagcggctctgcttgttcgtgtgtgtgtcgttgcaggccttattcaagcttaccatgcccagagtggtccctgaccagcggagcaagttcgagaacgaagagtttttccgcaaactgtccagagaatgcgagatcaagtacaccggctttcgggatcgcccgcacgaagagagacaagcccggttccagaatgcttgtcgcgacgggagatctgagattgcctttgttgcgacaggaacgaacctcagcctgcagttctttcccgcttcctggcagggcgaacaacggcagaccccttctcgcgagtatgtggatcttgaaagagaggccgggaaagtgtacctgaaggcccccatgatcctcaatggagtctgcgtgatttggaaaggctggatcgacctgcagcggcttgatgggatgggatgtctggagttcgacgaggaacgcgctcagcaagaagatgccctcgctcagcaggcctttgaggaagcgagacggcgcacaagagagttcgaggaccgggatagaagccatcgcgaagagatggaagttcacgagctggaaaagtccaagcgggccctggagacccagatggaggaaatgaaaacacaactcgaggaactggaggacgaacttcaggctaccgaggatgccaagctgagactcgaggtgaacatgcaggctctgaaaggccaatttgaacgcgaccttcaggcccgggatgagcagaatgaagagaagagacgccagctgcaacggcagctccatgagtatgaaacagagctggaagacgagagaaaacagcgcgcgctggccgctgccgctaagaagaaactcgaaggcgacctgaaggatcttgagctgcaggccgactctgccattaaagggcgggaggaagctatcaagcaactcagaaaactgcaggcgcagatgaaggatttccagcgcgagcttgaagacgcccgggctagcagagatgagatctttgccaccgccaaagaaaacgagaagaaggctaaatccctggaggccgacctcatgcaactgcaggaagatctggcggctgccgagcgggcccgcaagcaggctgacctcgaaaaagaggaactggccgaggagcttgctagctctctgtccggaagaaatgccctccaggatgaaaagcggagactggaggcgcgcattgcccaacttgaagaggagctggaagaggaacagggcaacatggaggctatgagcgaccgggtcagaaaagccacgcagcaagctgaacagctctctaatgagctggccaccgagcgctccacagcgcagaagaacgaaagcgccagacagcaactggagcggcagaataaggaactccgctctaaactgcacgagatggaaggggctgtgaagtccaaattcaagagcaccatcgccgctcttgaggccaaaattgcccagctggaggaacaggttgagcaagaagctagagagaagcaggcggccacaaagtccctcaaacagaaggataaaaagctgaaagaaatcctgcttcaggtggaggacgagcggaagatggctgaacaatacaaggagcaggccgaaaaaggaaacgcccgcgtcaagcagctcaaaagacaactggaggaggctgaagaggaatctcagcggattaatgccaaccgcagaaagctgcagcgggagctcgacgaagcgaccgagagcaatgaggctatgggccgcgaagtgaacgccctgaaatccaaacttagacgggggaacgagacgagcttcgtgccttctagacgctccggaggccggagagtcatcgaaaatgccgatggcagcgaggaagagacagacacccgcgatgctgactttaacgggacaaaggcctctgagtgaggactagtccctgttcccagagcccacttttttttctttttttgaaataaaatagcctgtctttcagatctaaaaaaaaaaaaaaaaaaaaaaaaaaaaaaaaaaaaaaaaaaaaaaaaaaaaaaaaaaaaaaaaaaaaaaaaaaaaaaaaaaaaaaaaaaaaaaaaaaaagaatt

SEQ ID NO: 1410 - RNA, 1804 nt, synthetic construct
  misc_feature 1..1804: note = Artificial____CBFbeta(1-165)_SMMHC(1527-1877) mRNA opt5
  source 1..1804: mol_type = other RNA
aggagagtcccgcagtcggcgtccagcggctctgcttgttcgtgtgtgtgtcgttgcaggccttattcaagcttaccatgcccagagtggtccctgaccagcggagcaagttcgagaacgaagagtttttccgcaaactgtccagagaatgcgagatcaagtacaccggctttcgggatcgcccgcacgaagagagacaagcccggttccagaatgcttgtcgcgacgggagatctgagattgcctttgttgcgacaggaacgaacctcagcctgcagttctttcccgcttcctggcagggcgaacaacggcagaccccttctcgcgagtatgtggatcttgaaagagaggccgggaaagtgtacctgaaggcccccatgatcctcaatggagtctgcgtgatttggaaaggctggatcgacctgcagcggcttgatgggatgggatgtctggagttcgacgaggaacgcgctcagcaagaagatgccctcgctcagcaggcctttgaggaagcgagacggcgcacaagagagttcgaggaccgggatagaagccatcgcgaagagatggaagttcacgagctggaaaagtccaagcgggccctggagacccagatggaggaaatgaaaacacaactcgaggaactggaggacgaacttcaggctaccgaggatgccaagctgagactcgaggtgaacatgcaggctctgaaaggccaatttgaacgcgaccttcaggcccgggatgagcagaatgaagagaagagacgccagctgcaacggcagctccatgagtatgaaacagagctggaagacgagagaaaacagcgcgcgctggccgctgccgctaagaagaaactcgaaggcgacctgaaggatcttgagctgcaggccgactctgccattaaagggcgggaggaagctatcaagcaactcagaaaactgcaggcgcagatgaaggatttccagcgcgagcttgaagacgcccgggctagcagagatgagatctttgccaccgccaaagaaaacgagaagaaggctaaatccctggaggccgacctcatgcaactgcaggaagatctggcggctgccgagcgggcccgcaagcaggctgacctcgaaaaagaggaactggccgaggagcttgctagctctctgtccggaagaaatgccctccaggatgaaaagcggagactggaggcgcgcattgcccaacttgaagaggagctggaagaggaacagggcaacatggaggctatgagcgaccgggtcagaaaagccacgcagcaagctgaacagctctctaatgagctggccaccgagcgctccacagcgcagaagaacgaaagcgccagacagcaactggagcggcagaataaggaactccgctctaaactgcacgagatggaaggggctgtgaagtccaaattcaagagcaccatcgccgctcttgaggccaaaattgcccagctggaggaacaggttgagcaagaagctagagagaagcaggcggccacaaagtccctcaaacagaaggataaaaagctgaaagaaatcctgcttcaggtggaggacgagcggaagatggctgaacaatacaaggagcaggccgaaaaaggaaacgcctgaggactagtccctgttcccagagcccacttttttttctttttttgaaataaaatagcctgtctttcagatctaaaaaaaaaaaaaaaaaaaaaaaaaaaaaaaaaaaaaaaaaaaaaaaaaaaaaaaaaaaaaaaaaaaaaaaaaaaaaaaaaaaaaaaaaaaaaaaaaaaagaatt

SEQ ID NO: 1411 - RNA, 865 nt, synthetic construct
  misc_feature 1..865: note = Artificial____CBFbeta(1-165)_Linker_Lifeact mRNA opt5
  source 1..865: mol_type = other RNA
aggagagtcccgcagtcggcgtccagcggctctgcttgttcgtgtgtgtgtcgttgcaggccttattcaagcttaccatgcccagagtggtccctgaccagcggagcaagttcgagaacgaagagtttttccgcaaactgtccagagaatgcgagatcaagtacaccggctttcgggatcgcccgcacgaagagagacaagcccggttccagaatgcttgtcgcgacgggagatctgagattgcctttgttgcgacaggaacgaacctcagcctgcagttctttcccgcttcctggcagggcgaacaacggcagaccccttctcgcgagtatgtggatcttgaaagagaggccgggaaagtgtacctgaaggcccccatgatcctcaatggagtctgcgtgatttggaaaggctggatcgacctgcagcggcttgatgggatgggatgtctggagttcgacgaggaacgcgctcagcaagaagatgccctcgctcagcaggcctttgaggaagcgagacggcgcacaagagagttcgaggaccgggatagaagccatcgcgaagagatggaaggcggctccgggggatctggcgggagcggaggctccgggggaggcggcgttgccgacctgattaagaagtttgagagcatctctaaagaagagggggatcctcccgtggctacctgaggactagtccctgttcccagagcccacttttttttctttttttgaaataaaatagcctgtctttcagatctaaaaaaaaaaaaaaaaaaaaaaaaaaaaaaaaaaaaaaaaaaaaaaaaaaaaaaaaaaaaaaaaaaaaaaaaaaaaaaaaaaaaaaaaaaaaaaaaaaaagaatt

SEQ ID NO: 1412 - RNA, 832 nt, synthetic construct
  misc_feature 1..832: note = Artificial____CBFbeta(1-165)_HIF1alpha(549-575) mRNA opt5
  source 1..832: mol_type = other RNA
aggagagtcccgcagtcggcgtccagcggctctgcttgttcgtgtgtgtgtcgttgcaggccttattcaagcttaccatgcccagagtggtccctgaccagcggagcaagttcgagaacgaagagtttttccgcaaactgtccagagaatgcgagatcaagtacaccggctttcgggatcgcccgcacgaagagagacaagcccggttccagaatgcttgtcgcgacgggagatctgagattgcctttgttgcgacaggaacgaacctcagcctgcagttctttcccgcttcctggcagggcgaacaacggcagaccccttctcgcgagtatgtggatcttgaaagagaggccgggaaagtgtacctgaaggcccccatgatcctcaatggagtctgcgtgatttggaaaggctggatcgacctgcagcggcttgatgggatgggatgtctggagttcgacgaggaacgcgctcagcaagaagatgccctcgctcagcaggcctttgaggaagcgagacggcgcacaagagagttcgaggaccgggatagaagccatcgcgaagagatggaacctttttccacccaggacacagatctggacctggagatgctcgccccctatattcctatggatgacgacttccaactgcggtgaggactagtccctgttcccagagcccacttttttttctttttttgaaataaaatagcctgtctttcagatctaaaaaaaaaaaaaaaaaaaaaaaaaaaaaaaaaaaaaaaaaaaaaaaaaaaaaaaaaaaaaaaaaaaaaaaaaaaaaaaaaaaaaaaaaaaaaaaaaaaagaatt

SEQ ID NO: 1413 - RNA, 877 nt, synthetic construct
  misc_feature 1..877: note Artificial____CBFbeta(1-165)_Linker_HIF1alpha(549-575) mRNA opt5
  source 1..877: mol_type = other RNA
aggagagtcccgcagtcggcgtccagcggctctgcttgttcgtgtgtgtgtcgttgcaggccttattcaagcttaccatgcccagagtggtccctgaccagcggagcaagttcgagaacgaagagtttttccgcaaactgtccagagaatgcgagatcaagtacaccggctttcgggatcgcccgcacgaagagagacaagcccggttccagaatgcttgtcgcgacgggagatctgagattgcctttgttgcgacaggaacgaacctcagcctgcagttctttcccgcttcctggcagggcgaacaacggcagaccccttctcgcgagtatgtggatcttgaaagagaggccgggaaagtgtacctgaaggcccccatgatcctcaatggagtctgcgtgatttggaaaggctggatcgacctgcagcggcttgatgggatgggatgtctggagttcgacgaggaacgcgctcagcaagaagatgccctcgctcagcaggcctttgaggaagcgagacggcgcacaagagagttcgaggaccgggatagaagccatcgcgaagagatggaaggcggctccgggggatctggcgggagcggaggctccgggggaggcccttttagcacccaggacacagatctggacctggagatgctcgccccctatattcctatggatgacgacttccaactgcggtgaggactagtccctgttcccagagcccacttttttttctttttttgaaataaaatagcctgtctttcagatctaaaaaaaaaaaaaaaaaaaaaaaaaaaaaaaaaaaaaaaaaaaaaaaaaaaaaaaaaaaaaaaaaaaaaaaaaaaaaaaaaaaaaaaaaaaaaaaaaaaagaatt

SEQ ID NO: 1414 - RNA, 2512 nt, synthetic construct
  misc_feature 1..2512: note = Artificial____RUNX1(1-177)_N_RUNX1T1a(31-604) mRNA opt5
  source 1..2512: mol_type = other RNA
aggagagtcccgcagtcggcgtccagcggctctgcttgttcgtgtgtgtgtcgttgcaggccttattcaagcttaccatgagaatccccgtggacgccagcacctcccggcgcttcacacctccgtctacggctctgagccccggcaagatgtccgaggccctccctctgggggcgcccgatgctggagccgcccttgctggcaaactgagatctggggaccggagcatggtcgaagttctcgccgatcaccctggagagctggtgcgcaccgactcccccaactttctttgctctgtgctgcctacacattggagatgtaataagaccctcccgattgctttcaaagtcgtggccctgggcgatgttcccgacgggacactggtgaccgtcatggcgggaaacgatgaaaattacagcgccgagctccggaacgctacagccgctatgaagaatcaggtggcccgctttaacgacctgagattcgttggccggtccggccgcgggaaatcttttacccttacgatcaccgtgttcacaaatcctccccaagtcgcgacctatcacagagccattaagatcacagtggatggacctcgggaaccccgcaacagaaccgagaagcattctacgatgccggactcccctgtggatgtcaaaacacagagccggctgacaccccctaccatgccccctcccccgaccacccagggcgctccccgcacatcttcctttacgcctaccacactcaccaatgggacaagccactctcccaccgccctgaacggagctccttccccgcccaatggcttcagcaacgggccttcctctagctccagcagctcccttgccaatcagcaactgccccctgcctgcggagctagacagctcagcaagctgaaacggtttctgacgacactccagcagttcggcaacgacatttctcccgagatcggcgaaagagttcgcaccctggtgcttgggctggtgaatagcaccctcacaatcgaggaatttcattccaagctgcaagaggcgaccaacttccctcttcggccctttgtcattccgttcctgaaagccaacctccctctgctgcagagagagctcctgcactgtgctcgccttgccaagcagaatcccgcccagtacctggctcaacacgaacagctcctgcttgatgcctctacaacgagccccgtggactccagcgagctgctcctggacgttaacgaaaatggaaagcggagaacccctgatcgcacaaaagagaacggcttcgaccgggaaccgctgcattctgagcacccctccaagagaccttgcaccatcagccccgggcagcgctattctcctaataacggactctcctaccaacccaatggcctgcctcatcccacaccgcctccccctcagcactatcggcttgatgacatggcgattgctcaccattacagagatagctatcgccacccctcccatcgggacctgagagatcggaaccgcccgatggggctccacggaaccagacaggaggaaatgatcgaccatcggctgacggatagagagtgggccgaagagtggaaacacctggaccaccttctcaattgtattatggatatggtggaaaagacccgccggtctctgacagtcctgagacgctgccaggaggccgacagagaggaactcaactactggatccggcgctacagcgacgctgaggatctgaaaaagggcggcgggtcctctagctcccatagcagacaacagtctcctgtgaatcccgaccctgttgcccttgatgctcaccgggaatttctgcatcgccccgcctccggatatgtgcccgaggaaatttggaaaaaggcggaggaggccgtcaacgaagtgaagagacaggctatgaccgagctccagaaagccgtcagcgaagctgagcggaaggcccacgacatgatcacaaccgagcgcgcgaaaatggaaagaacggtggccgaggctaagcggcaagccgctgaagatgccctggccgttatcaatcagcaggaggactcttccgaaagctgttggaactgcggccgcaaagctagcgagacatgtagcgggtgcaataccgcgagatactgtggatccttctgccagcacaaggattgggagaagcatcaccatatttgcggccaaacactgcaggcccagcagcaaggggacacccctgctgtgtcttcttccgtcaccccgaacagcggcgccggatcccccatggatacacctcccgccgctacgcctcggtctaccacacccggcacccctagcacaatcgaaaccacgccgagatgaggactagtccctgttcccagagcccacttttttttctttttttgaaataaaatagcctgtctttcagatctaaaaaaaaaaaaaaaaaaaaaaaaaaaaaaaaaaaaaaaaaaaaaaaaaaaaaaaaaaaaaaaaaaaaaaaaaaaaaaaaaaaaaaaaaaaaaaaaaaaagaatt

SEQ ID NO: 1415 - RNA, 1027 nt, synthetic construct
  misc_feature 1..1027: note = Artificial____RUNX1(1-241)_RUNX1T1b(short) mRNA opt5
  source 1..1027: mol_type = other RNA
aggagagtcccgcagtcggcgtccagcggctctgcttgttcgtgtgtgtgtcgttgcaggccttattcaagcttaccatgagaatccccgtggacgccagcacctcccggcgcttcacacctccgtctacggctctgagccccggcaagatgtccgaggccctccctctgggggcgcccgatgctggagccgcccttgctggcaaactgagatctggggaccggagcatggtcgaagttctcgccgatcaccctggagagctggtgcgcaccgactcccccaactttctttgctctgtgctgcctacacattggagatgtaataagaccctcccgattgctttcaaagtcgtggccctgggcgatgttcccgacgggacactggtgaccgtcatggcgggaaacgatgaaaattacagcgccgagctccggaacgctacagccgctatgaagaatcaggtggcccgctttaacgacctgagattcgttggccggtccggccgcgggaaatcttttacccttacgatcaccgtgttcacaaatcctccccaagtcgcgacctatcacagagccattaagatcacagtggatggacctcgggaaccccgcagacatcggcagaagctggacgatcagaccaaaccgggcagcctctcctttagcgagcgcctgtctgagcttgaacagctgagacggacggctatgagagtgtcccctcaccatcccgcccctacacccaacccccgcgctagcctcaatcactctaccgccttcaaccctcaaccgcagtcccagatgcaggaggtcgggttttgccacgttgcccaagtgggactgaagctgctcggctgaggactagtccctgttcccagagcccacttttttttctttttttgaaataaaatagcctgtctttcagatctaaaaaaaaaaaaaaaaaaaaaaaaaaaaaaaaaaaaaaaaaaaaaaaaaaaaaaaaaaaaaaaaaaaaaaaaaaaaaaaaaaaaaaaaaaaaaaaaaaaagaatt

SEQ ID NO: 1416 - RNA, 2731 nt, synthetic construct
  misc_feature 1..2731: note = Artificial____RUNX1(1-241)_V_RUNX1T1b(22-604) mRNA opt5
  source 1..2731: mol_type = other RNA
aggagagtcccgcagtcggcgtccagcggctctgcttgttcgtgtgtgtgtcgttgcaggccttattcaagcttaccatgagaatccccgtggacgccagcacctcccggcgcttcacacctccgtctacggctctgagccccggcaagatgtccgaggccctccctctgggggcgcccgatgctggagccgcccttgctggcaaactgagatctggggaccggagcatggtcgaagttctcgccgatcaccctggagagctggtgcgcaccgactcccccaactttctttgctctgtgctgcctacacattggagatgtaataagaccctcccgattgctttcaaagtcgtggccctgggcgatgttcccgacgggacactggtgaccgtcatggcgggaaacgatgaaaattacagcgccgagctccggaacgctacagccgctatgaagaatcaggtggcccgctttaacgacctgagattcgttggccggtccggccgcgggaaatcttttacccttacgatcaccgtgttcacaaatcctccccaagtcgcgacctatcacagagccattaagatcacagtggatggacctcgggaaccccgcagacatcggcagaagctggacgatcagaccaaaccgggcagcctctcctttagcgagcgcctgtctgagcttgaacagctgagacggacggctatgagagtgtcccctcaccatcccgcccctacacccaacccccgcgctagcctcaatcactctaccgccttcaaccctcaaccgcagtcccagatgcaggtcgggcccgagaagcgggttcctgccatgcccggaagccctgtggaagtgaaaattcaatccagatctagccctccgacaatgcctcccctgcctcccatcaatcctggcgggccccgcccggtctcctttacccctaccgctctgagcaacggaatcaatcactctcctcccacactcaacggcgcgccctccccgccccagcggttcagcaatggccctgcctctagcacgtcctctgctctgaccaaccagcagcttcccgccacatgcggggccagacaactgagcaagctcaaacgctttctgaccacacttcagcagttcggaaacgacatttcccctgagatcggcgagaaggtgcggaccctggttctcgctctggtgaatagcacggtcacaattgaagagtttcattgtaagctgcaagaagccaccaacttccccctcagacctttcgtgatcccctttctgaaagcgaatcttccgctgctccagcgcgagctgcttcactgcgctcgggccgccaagcagaccccttctcagtacctggctcaacatgaacacctcctgctgaacacatccattgccagccccgctgattcttccgagctcctgatggaggttcacgggaatggaaaaagacctagccccgaacgccgggaggaaaactccttcgacagagacaccatcgccccggagcctcccgcgaagcgggtgtgtacaatttctcctgctccccgccatagccccgcccttacggtccctctgatgaatccgggcgggcagtttcaccccacccctccccctctccagcattatacactggaagatatcgccacctcccacctgtacagagagcccaacaaaatgcttgagcatcgggaagtgagagaccgccaccactctctcggactgaatggcggctatcaggatgagctggtcgaccatcggctcacagaaagagagtgggctgatgaatggaagcacctggaccatgcccttaactgcatcatggagatggtggagaaaacccgcagaagcatggcggttctgcggcgctgtcaagaatccgatagagaggaactcaattactggaagcggcgctataacgagaatacggagctgagaaagaccgggacagaactggtgagccggcagcactctcctggatccgccgacagcctttctaacgattcccagcgcgagttcaatagcagaccgggcaccgggtacgtccccgtggaattttggaaaaagacagaggaagctgttaacaaagtgaagattcaggccatgtctgaggtccaaaaagctgtggccgaggccgaacagaaggctttcgaggtgatcgcgaccgaacgggcccgcatggagcagacgattgctgacgttaagagacaggccgccgaagatgcttttctcgtcatcaacgagcaagaggaaagcacagagaattgctggaactgtggacggaaagcctccgaaacctgcagcggctgtaatattgcgagatactgcgggtctttctgccagcacaaggactgggagcgccatcaccggctgtgtggccagaacctgcatggacaatcccctcacggccaggggagacccctcctgcctgtgggacgcggcagctccgctcggtctgccgactgcagcgtgccctccccggcccttgataaaacatctgctaccaccagcagatcctctacacccgccagcgtcacggcgatcgacaccaatgggctgtgaggactagtccctgttcccagagcccacttttttttctttttttgaaataaaatagcctgtctttcagatctaaaaaaaaaaaaaaaaaaaaaaaaaaaaaaaaaaaaaaaaaaaaaaaaaaaaaaaaaaaaaaaaaaaaaaaaaaaaaaaaaaaaaaaaaaaaaaaaaaaagaatt

SEQ ID NO: 1417 - RNA, 2731 nt, synthetic construct
  misc_feature 1..2731: note = Artificial____RUNX1(1-241)_I_RUNX1T1b(22-604) mRNA opt5
  source 1..2731: mol_type = other RNA
aggagagtcccgcagtcggcgtccagcggctctgcttgttcgtgtgtgtgtcgttgcaggccttattcaagcttaccatgagaatccccgtggacgccagcacctcccggcgcttcacacctccgtctacggctctgagccccggcaagatgtccgaggccctccctctgggggcgcccgatgctggagccgcccttgctggcaaactgagatctggggaccggagcatggtcgaagttctcgccgatcaccctggagagctggtgcgcaccgactcccccaactttctttgctctgtgctgcctacacattggagatgtaataagaccctcccgattgctttcaaagtcgtggccctgggcgatgttcccgacgggacactggtgaccgtcatggcgggaaacgatgaaaattacagcgccgagctccggaacgctacagccgctatgaagaatcaggtggcccgctttaacgacctgagattcgttggccggtccggccgcgggaaatcttttacccttacgatcaccgtgttcacaaatcctccccaagtcgcgacctatcacagagccattaagatcacagtggatggacctcgggaaccccgcagacatcggcagaagctggacgatcagaccaaaccgggcagcctctcctttagcgagcgcctgtctgagcttgaacagctgagacggacggctatgagagtgtcccctcaccatcccgcccctacacccaacccccgcgctagcctcaatcactctaccgccttcaaccctcaaccgcagtcccagatgcagattgggcccgagaagcgggtccctgccatgcccggaagccctgttgaagtgaaaatccaatccagatctagccctccgacaatgcctcccctgcctcccatcaatcctggcgggccccgcccggtgtcctttacccctaccgctctgagcaacggaattaatcactctcctcccacactcaacggcgcgccctccccgccccagcggttcagcaatggccctgcctctagcacgtcctctgctctgaccaaccagcagcttcccgccacatgcggggccagacaactgagcaagctcaaacgctttctgaccacacttcagcagttcggaaacgacatctcccctgagattggcgagaaggtccggaccctggtgctcgctctggttaatagcacggtgacaatcgaagagtttcattgtaagctgcaagaagccaccaacttccccctcagacctttcgtcattccctttctgaaagcgaatcttccgctgctccagcgcgagctgcttcactgcgctcgggccgccaagcagaccccttctcagtacctggctcaacatgaacacctcctgctgaacacatccatcgccagccccgctgattcttccgagctcctgatggaggtgcacgggaatggaaaaagacctagccccgaacgccgggaggaaaactccttcgacagagacaccattgccccggagcctcccgcgaagcgggtttgtacaatctctcctgctccccgccatagccccgcccttacggtgcctctgatgaatccgggcgggcagtttcaccccacccctccccctctccagcattatacactggaagatatcgccacctcccacctgtacagagagcccaacaaaatgcttgagcatcgggaagtcagagaccgccaccactctctcggactgaatggcggctatcaggatgagctggtggaccatcggctcacagaaagagagtgggctgatgaatggaagcacctggaccatgcccttaactgcattatggagatggtcgagaaaacccgcagaagcatggcggtgctgcggcgctgtcaagaatccgatagagaggaactcaattactggaagcggcgctataacgagaatacggagctgagaaagaccgggacagaactggttagccggcagcactctcctggatccgccgacagcctttctaacgattcccagcgcgagttcaatagcagaccgggcaccgggtacgtgcccgtcgaattttggaaaaagacagaggaagctgtgaacaaagttaagatccaggccatgtctgaggtgcaaaaagctgtcgccgaggccgaacagaaggctttcgaggtgattgcgaccgaacgggcccgcatggagcagacgatcgctgacgtgaagagacaggccgccgaagatgcttttctcgttattaacgagcaagaggaaagcacagagaattgctggaactgtggacggaaagcctccgaaacctgcagcggctgtaatatcgcgagatactgcgggtctttctgccagcacaaggactgggagcgccatcaccggctgtgtggccagaacctgcatggacaatcccctcacggccaggggagacccctcctgcctgtcggacgcggcagctccgctcggtctgccgactgcagcgtgccctccccggcccttgataaaacatctgctaccaccagcagatcctctacacccgccagcgtgacggcgatcgacaccaatgggctgtgaggactagtccctgttcccagagcccacttttttttctttttttgaaataaaatagcctgtctttcagatctaaaaaaaaaaaaaaaaaaaaaaaaaaaaaaaaaaaaaaaaaaaaaaaaaaaaaaaaaaaaaaaaaaaaaaaaaaaaaaaaaaaaaaaaaaaaaaaaaaaagaatt

SEQ ID NO: 1418 - RNA, 1615 nt, synthetic construct
  misc_feature 1..1615: note = Homo sapiens__Q01196-1__RUNX1(K83E_R174Q) mRNA opt11
  source 1..1615: mol_type = other RNA
aggagagtcccgcagtcggcgtccagcggctctgcttgttcgtgtgtgtgtcgttgcaggccttattcaagcttaccatgcgcatcccagtagacgcctcaacctcacgtcgcttcacccctccctcaacagccctctcacccggcaaaatgtccgaagcattacccctcggtgcccccgacgcaggcgcagcactcgccggcaaacttcgatctggcgaccgatccatggtcgaagtcctagccgaccaccccggcgaactcgtacgaacagactcacccaatttcctctgctccgtcctccccactcactggcgctgcaacgaaaccctgcccattgccttcaaagtcgtcgcacttggcgacgtcccagacggcaccctagtaacagtaatggccggaaacgacgaaaactactcagcagaactacgcaacgccaccgccgccatgaaaaaccaagtagcccgcttcaacgatctacgattcgtcggccgatccggacgtggcaaatccttcactcttacaatcacagtcttcacaaatcccccacaagtcgccacctaccaccgcgccatcaaaattaccgttgacggcccccaagaaccaagacgccatcgtcaaaaacttgacgaccaaaccaaacccggctcactatcattctccgaacgcctctccgaactcgaacaactccgccgcaccgccatgcgcgtctcaccccaccaccccgctcccacaccaaaccccagggcctcccttaaccactccaccgcattcaacccccaaccacaatcccaaatgcaagacacacgacaaatacaaccatccccaccgtggtcatacgaccaatcttaccaatacctcggttctatagcctccccatccgtccacccagccacacccatctcccccggccgcgcatccggaatgaccacactctcagccgaactctcctcccgcctatcaaccgcccctgacctcaccgccttttccgacccccgacaattccccgcactaccgtcaatctccgacccccgaatgcactatcccggcgccttcacctactcccccacacctgtaacctccggcatcggcatcggcatgtccgccatgggaagcgccaccagatatcatacttacctacccccaccttatccaggatcctcacaagcccaaggcggcccttttcaagcctcctccccctcctaccatctctactacggcgcctccgccggctcctaccaattctccatggtcggcggcgaacgatcaccaccccgaatcctccctccctgcaccaacgcatcgaccggatcggccctcttaaacccctccctccccaaccaatcagacgtcgtcgaagccgaaggatctcactccaactcccccacaaacatggcaccttcagcccgcctcgaagaagccgtctggcgcccctactaaggactagtccctgttcccagagcccacttttttttctttttttgaaataaaatagcctgtctttcagatctaaaaaaaaaaaaaaaaaaaaaaaaaaaaaaaaaaaaaaaaaaaaaaaaaaaaaaaaaaaaaaaaaaaaaaaaaaaaaaaaaaaaaaaaaaaaaaaaaaaagaatt

SEQ ID NO: 1419 - RNA, 2089 nt, synthetic construct
  misc_feature 1..2089: note = Homo sapiens____CBFbeta(1-165)_SMMHC(1527-1972) mRNA opt11
  source 1..2089: mol_type = other RNA
aggagagtcccgcagtcggcgtccagcggctctgcttgttcgtgtgtgtgtcgttgcaggccttattcaagcttaccatgccaagggtggtgcccgaccagagaagcaagttcgaaaatgaggaatttttccggaagctgagcagggaatgcgagataaaatacacgggcttccgagacagaccacacgaagagaggcaagcgaggttccaaaacgcctgcagagacggaagaagcgagatagcgttcgtggccacggggacgaacctgagcctacagttcttccctgcaagctggcaaggagaacagaggcagacaccgagtagggagtacgtggacctggagagggaggcggggaaggtgtacctgaaggcaccaatgatactaaatggagtatgtgtaatctggaagggatggatagacctgcaacggctggacgggatgggatgcctggagttcgacgaggaaagagcgcagcaagaggacgcgctggcacaacaggcgttcgaggaagcaaggaggcggacgcgagagttcgaggacagggataggagccacagagaggagatggaggtacacgagctagagaaaagcaagagggcgctggaaacacaaatggaggagatgaagacacagctggaggagttggaagacgaactgcaagcgacagaggacgcaaagctgaggctggaagtcaacatgcaggcattaaagggacagttcgagagagacctgcaggcaagagacgagcagaacgaggaaaagaggaggcagctccaaaggcagctgcacgagtacgaaacggaactggaggacgagcgaaagcagagggcgctagcagcagcagcaaagaaaaagctggagggggacctgaaggacctggagttgcaggcagacagcgcaataaaagggagggaagaggcgatcaagcaactaagaaagctgcaggcacaaatgaaggatttccagagagagctagaggatgcaagggcaagccgggacgagatattcgcgacggcaaaagaaaacgagaaaaaggcgaaaagcctagaagcagacctgatgcagctacaggaggatttggcggcggcggagagggcaaggaaacaggcagatctggagaaggaggagctggcggaagagttggcaagtagcctaagcggaaggaatgcgctgcaggacgaaaagcggagactcgaggcgagaatagcacagctagaggaggaactggaggaggagcagggaaacatggaagcgatgagcgacagagtgagaaaggcgacgcaacaggcggaacagctaagcaacgagttagcaacggagagaagtacagcccaaaagaatgaaagtgcaaggcaacagctagagaggcagaacaaggaactgaggagcaagctgcacgagatggaaggagcagtgaaaagcaaattcaaaagcaccatcgcggcgctggaagcgaagatagcgcagctggaggagcaggtagaacaagaggcaagagagaagcaagcggcgacaaagagtctaaagcagaaagacaagaaactgaaagagatactgttacaagtggaggacgaaaggaagatggcagagcaatacaaggagcaggcggaaaaggggaacgcgagggtgaaacagttaaagaggcaactggaggaggcggaggaagagagccaaagaataaacgccaacagaaggaaactacagcgggaattggacgaggcaacagagagtaacgaagccatggggcgagaagtgaacgcactaaagagcaaactgaggcgggggaacgagacgagtttcgtaccgagcaggcggagcggagggagaagggtgatagagaatgcagacggcagcgaagaggaaacggacacgagagacgcagacttcaacgggacgaaggcgagcgaatagggactagtccctgttcccagagcccacttttttttctttttttgaaataaaatagcctgtctttcagatctaaaaaaaaaaaaaaaaaaaaaaaaaaaaaaaaaaaaaaaaaaaaaaaaaaaaaaaaaaaaaaaaaaaaaaaaaaaaaaaaaaaaaaaaaaaaaaaaaaaagaatt

SEQ ID NO: 1420 - RNA, 1804 nt, synthetic construct
  misc_feature 1..1804: note = Artificial____CBFbeta(1-165)_SMMHC(1527-1877) mRNA opt11
  source 1..1804: mol_type = other RNA
aggagagtcccgcagtcggcgtccagcggctctgcttgttcgtgtgtgtgtcgttgcaggccttattcaagcttaccatgccgagggtggtgccagaccaaaggagcaagttcgagaacgaggaatttttcagaaagctgagcagagagtgcgagataaagtacacggggtttagagacagaccacacgaggagaggcaggcaaggttccagaacgcatgcagagacgggagaagcgagatagcattcgtagcgacaggaacaaacctaagcctacaatttttcccggcgagctggcagggagagcagagacagacgccaagcagggagtacgtggacctagagagggaagcaggaaaggtgtacctaaaggcaccaatgatactaaatggggtgtgcgtaatatggaaggggtggatagacctacagagactggacgggatgggatgcttggagttcgacgaagagagagcgcaacaggaggacgcactggcacaacaagcattcgaagaggcaaggaggaggacgagagagttcgaggacagagacaggagtcacagggaggaaatggaggtacacgaactagagaaaagcaagagggcgctggagacacagatggaagagatgaaaacgcaactggaggagctggaagacgagctgcaggcaacagaagatgcgaagctaaggctggaggtgaacatgcaggcactgaaaggacagttcgaaagggacctgcaggcgagggacgaacagaacgaggaaaagaggaggcagctccagaggcagctacacgagtacgagacggagttggaagacgagagaaagcaaagagcactagcggcggcggcgaagaaaaagctagagggagacctcaaagatctggagctacaggcagacagcgcgataaagggcagggaggaagcgataaagcagctaaggaagctgcaggcacagatgaaggacttccagagggagctcgaggacgcaagagcgagccgggacgagatattcgccacggcaaaggagaacgaaaagaaggcgaaaagcctggaggcggacctaatgcaactgcaagaagacctggcagcggcagagcgagcgaggaagcaggcagacctagagaaggaggagctggcggaagaactggcgagtagcctgagcggaaggaacgcactgcaggacgagaagaggaggctagaggcaagaatagcgcagctggaggaggagttggaggaggagcaggggaacatggaggcgatgagcgacagagtgagaaaggcgacacagcaagcagagcagttaagcaacgagctggcaacagagagaagcacggcgcaaaagaacgaatcagcgaggcaacagttggagaggcagaacaaggaactaagaagcaagctgcacgagatggagggcgcggtaaagagcaaattcaagtcaacaatagcggcgcttgaggcaaagatagcacagctggaagaacaagtagaacaggaggcgagagagaaacaagcagcgacaaagagcctgaaacagaaggacaagaagttaaaggagatactgctacaggtagaggacgaaagaaaaatggcggaacagtacaaagagcaggcagaaaaggggaacgcataaggactagtccctgttcccagagcccacttttttttctttttttgaaataaaatagcctgtctttcagatctaaaaaaaaaaaaaaaaaaaaaaaaaaaaaaaaaaaaaaaaaaaaaaaaaaaaaaaaaaaaaaaaaaaaaaaaaaaaaaaaaaaaaaaaaaaaaaaaaaaagaatt

SEQ ID NO: 1421 - RNA, 865 nt, synthetic construct
  misc_feature 1..865: note = Artificial____CBFbeta(1-165)_Linker_Lifeact mRNA opt11
  source 1..865: mol_type = other RNA
aggagagtcccgcagtcggcgtccagcggctctgcttgttcgtgtgtgtgtcgttgcaggccttattcaagcttaccatgccgcgcgtggtcccggaccagcgctcgaaatttgaaaatgaagagttctttcgcaagctctcgcgagagtgcgagataaagtacacgggctttcgcgatagaccgcacgaggaaaggcaagcgcgctttcaaaatgcctgtagagatggcaggagcgagatcgcgttcgtggccacgggcacgaacttgagcctgcaatttttcccggcctcgtggcagggcgagcagaggcaaacgccctcgcgcgagtacgtggacttggaaagggaagcgggcaaggtgtatctaaaggccccgatgatactaaatggagtgtgcgtgatctggaaagggtggatagacctgcaaaggctcgatggaatgggctgtctagagttcgatgaggaacgcgcgcaacaggaagacgcattggcacagcaagcgttcgaggaagcacgcaggagaacgcgcgagttcgaggacagggacaggagccatcgcgaggaaatggaagggggctcgggagggagcgggggctctggcgggagcgggggaggaggcgtggccgatctcatcaaaaagttcgagagcataagcaaagaagagggcgatcccccggtagcgacatagggactagtccctgttcccagagcccacttttttttctttttttgaaataaaatagcctgtctttcagatctaaaaaaaaaaaaaaaaaaaaaaaaaaaaaaaaaaaaaaaaaaaaaaaaaaaaaaaaaaaaaaaaaaaaaaaaaaaaaaaaaaaaaaaaaaaaaaaaaaaagaatt

SEQ ID NO: 1422 - RNA, 832 nt, synthetic construct
  misc_feature 1..832: note = Artificial____CBFbeta(1-165)_HIF1alpha(549-575) mRNA opt11
  source 1..832: mol_type = other RNA
aggagagtcccgcagtcggcgtccagcggctctgcttgttcgtgtgtgtgtcgttgcaggccttattcaagcttaccatgccgcgcgtggtcccggaccagcgctcgaaatttgaaaatgaagagttctttcgaaagctctcgcgcgagtgcgagatcaaatacacgggcttccgcgatcgcccgcacgaggaaaggcaagcgcgctttcaaaatgcctgtcgcgatggcaggagcgagatcgcgttcgtggccacgggcacgaacctgagcctgcaatttttcccggcctcgtggcagggcgagcaaaggcaaacgccctcgcgcgagtacgtggacttggaaagggaagcgggcaaggtctatctcaaggccccgatgatactcaatggcgtgtgcgtgatctggaaagggtggatagacttgcaaaggctcgatggcatgggctgtctcgagttcgacgaggaacgcgcgcaacaggaagatgccctggcccagcaagcgttcgaggaagcgcgcaggcgcacgcgcgagttcgaggacagagacaggagccaccgagaggaaatggaaccgttctcgacccaggacacggacctggacttggaaatgctcgcgccctatatcccgatggatgacgatttccagctcaggtaaggactagtccctgttcccagagcccacttttttttctttttttgaaataaaatagcctgtctttcagatctaaaaaaaaaaaaaaaaaaaaaaaaaaaaaaaaaaaaaaaaaaaaaaaaaaaaaaaaaaaaaaaaaaaaaaaaaaaaaaaaaaaaaaaaaaaaaaaaaaaagaatt

SEQ ID NO: 1423 - RNA, 877 nt, synthetic construct
  misc_feature 1..877: note Artificial____CBFbeta(1-165)_Linker_HIF1alpha(549-575) mRNA opt11
  source 1..877: mol_type = other RNA
aggagagtcccgcagtcggcgtccagcggctctgcttgttcgtgtgtgtgtcgttgcaggccttattcaagcttaccatgccgcgcgtggtcccggaccagcgctcgaaatttgaaaatgaagagttctttcgaaagctatcgcgagagtgcgagatcaagtacacgggattccgcgatcgaccgcacgaggaaagacaagcgcgatttcaaaatgcatgtcgcgatggcaggagcgagatagcgttcgtggccacgggcacaaacttgagcttgcaattcttcccggcatcatggcagggcgagcaaaggcaaacaccctcgcgcgagtacgtggacttggaaagggaagcgggcaaggtctacctaaaggccccgatgatactcaatggagtgtgcgtgatctggaaagggtggatagacttacaaaggctcgatggcatgggatgtctcgagttcgatgaggaacgcgcgcaacaggaagatgccttggcacagcaagcgttcgaggaagcgcgcaggcgaacgcgcgagttcgaagacagagacaggagccatcgagaggaaatggaaggaggatcgggcggaagcgggggctcgggcgggagcgggggcggaccatttagcacgcaagataccgatctagatctcgagatgttggccccgtacatacccatggacgatgactttcaattgcgctagggactagtccctgttcccagagcccacttttttttctttttttgaaataaaatagcctgtctttcagatctaaaaaaaaaaaaaaaaaaaaaaaaaaaaaaaaaaaaaaaaaaaaaaaaaaaaaaaaaaaaaaaaaaaaaaaaaaaaaaaaaaaaaaaaaaaaaaaaaaaagaatt

SEQ ID NO: 1424 - RNA, 2512 nt, synthetic construct
  misc_feature 1..2512: note = Artificial____RUNX1(1-177)_N_RUNX1T1a(31-604) mRNA opt11
  source 1..2512: mol_type = other RNA
aggagagtcccgcagtcggcgtccagcggctctgcttgttcgtgtgtgtgtcgttgcaggccttattcaagcttaccatgcgcataccagtagatgcctccacctctcgccgcttcacacctccctcgacagccctcagccccggaaaaatgtccgaagcgctcccacttggcgcacccgacgcaggcgctgccctcgccggaaaactccgtagtggtgaccgctctatggtggaagtcttagccgaccaccccggagaactcgtaagaacagactccccaaacttcctctgctccgtgctacctacacactggcgctgcaacaaaaccctcccgattgccttcaaagtcgtagccctaggcgacgtccccgacggaaccctcgtcaccgtcatggcaggcaatgatgaaaactactccgcagaactccgcaacgccaccgctgcaatgaaaaaccaagtcgcacgattcaatgacctcagattcgtagggcgctccggccgagggaaatcattcaccctcacaatcacagtcttcaccaaccctccacaagtcgcaacataccaccgcgccatcaaaatcacagtcgacggaccccgagaaccccgcaatagaactgagaaacacagcaccatgcccgattcgccagtcgatgtcaaaacccaatcaaggctcaccccgcccacaatgcccccacccccaaccacacagggcgcaccccgcacctcttcattcacccctacaacactaacaaatggcacatcccacagtccaaccgcccttaatggcgccccatccccaccaaacggtttctccaacggcccctcctcttcatcatcatcctccctggctaaccaacaactcccacccgcatgcggagcacgacaactcagcaaactaaaacgattcctcaccactcttcaacaattcggcaacgacatatccccagaaataggcgaacgagtccgaaccctagtcctcggtctagtcaattccacgctcactatagaggagttccactccaaactacaagaagctaccaacttcccactccgaccattcgtcattccattcctcaaggcaaacctccctctgctccaacgtgaactcctacactgcgccagactcgccaagcaaaaccccgcacaatatcttgcccaacacgaacaacttctcttagacgcctccaccacatctcccgtcgactcatctgaacttctcctagatgttaacgaaaacggcaaacgcagaactcccgaccgcaccaaagaaaacgggttcgatagagaaccactacacagcgaacacccctctaaacgcccatgcaccatatctcctggccaacggtactcacctaacaacggtctctcataccaacccaatggcctcccacaccccaccccaccacccccacaacactaccgacttgacgacatggcgatcgcacaccactacagagactcttataggcacccatcccaccgcgatctccgcgaccgcaatcgccccatgggactacacggcactcgccaagaagaaatgatcgaccaccgactaaccgaccgtgaatgggcagaagaatggaaacacctcgaccacctcctaaattgcatcatggacatggtcgagaaaacaaggcgctcactcacggttctccgtcgctgccaagaagcagatcgtgaagaactgaactattggattcgacgatactcagacgccgaagacctcaagaaaggcggaggctcatctagctcccatagtcgccaacaatcacccgtaaacccggacccagtagccctcgacgctcaccgagagttcctacaccgtcccgcctccggatacgtacccgaagaaatatggaagaaagctgaagaagcagtaaacgaagtcaaacgccaagctatgaccgaactacaaaaagccgtaagcgaagctgaacgcaaagcacacgacatgatcactaccgaacgcgcaaaaatggaacgaaccgtcgcagaagccaaacgccaggccgccgaagacgcccttgctgtcataaatcagcaagaagactcctccgaatcctgctggaactgtggccgcaaagccagcgaaacctgctccggttgcaataccgcccgctactgcggttcattctgccagcacaaagactgggaaaaacaccaccacatctgcggtcaaaccctgcaagctcaacaacaaggcgacacccctgccgtctcatccagcgtaacccccaacagcggcgccggctccccaatggacaccccacccgcagccacaccccgatcaacaacacccggaacaccctcgactatcgaaaccacaccccgttagggactagtccctgttcccagagcccacttttttttctttttttgaaataaaatagcctgtctttcagatctaaaaaaaaaaaaaaaaaaaaaaaaaaaaaaaaaaaaaaaaaaaaaaaaaaaaaaaaaaaaaaaaaaaaaaaaaaaaaaaaaaaaaaaaaaaaaaaaaaaagaatt

SEQ ID NO: 1425 - RNA, 1027 nt, synthetic construct
  misc_feature 1..1027: note = Artificial____RUNX1(1-241)_RUNX1T1b(short) mRNA opt11
  source 1..1027: mol_type = other RNA
aggagagtcccgcagtcggcgtccagcggctctgcttgttcgtgtgtgtgtcgttgcaggccttattcaagcttaccatgcgcatcccagtcgacgcctccacctcccgccgcttcaccccaccctcaacagcactctcacccggcaaaatgtcagaagcactccctctcggagcacccgacgccggcgccgccctcgccggcaaactccgctcaggcgaccgatcaatggtcgaagtcctagccgaccaccccggagaactcgtccgcaccgactcacccaacttcctctgctccgtcctacccacccactggcgctgcaacaaaaccctccccatcgccttcaaagtcgtcgcactaggcgacgtcccagacggcaccctcgtcaccgtcatggccggcaacgacgaaaactactccgccgaactccgcaacgccacagcagccatgaaaaaccaagtcgcccgcttcaacgacctccgcttcgtaggccgctccggccgcggcaaatccttcaccctaaccatcacagtattcaccaatccaccccaagtcgccacctaccaccgcgctatcaaaatcaccgtcgacggcccccgcgaaccccgccgccaccgacaaaaactcgacgaccaaaccaaacccggctcactctccttctccgaacgcctctccgaactcgaacaactccgccgaacagccatgcgcgtctcaccccaccaccccgcccccacccccaacccccgagcctccctcaaccactcaaccgccttcaacccccaaccacaatcccaaatgcaagaagtcggcttctgccacgtagcccaagtcggtctcaaactcctcggctaaggactagtccctgttcccagagcccacttttttttctttttttgaaataaaatagcctgtctttcagatctaaaaaaaaaaaaaaaaaaaaaaaaaaaaaaaaaaaaaaaaaaaaaaaaaaaaaaaaaaaaaaaaaaaaaaaaaaaaaaaaaaaaaaaaaaaaaaaaaaaagaatt

SEQ ID NO: 1426 - RNA, 2731 nt, synthetic construct
  misc_feature 1..2731: note = Artificial____RUNX1(1-241)_V_RUNX1T1b(22-604) mRNA opt11
  source 1..2731: mol_type = other RNA
aggagagtcccgcagtcggcgtccagcggctctgcttgttcgtgtgtgtgtcgttgcaggccttattcaagcttaccatgcgcatccccgtggacgcctcaacaagccgacgcttcacgcccccatccaccgccctatcccccggcaaaatgtcagaagccctccccctcggagccccagacgcaggggccgcactcgcaggcaaacttcgatccggggacaggagcatggtcgaagtcctagccgaccaccccggagagctagtccgaaccgactcccccaacttcctgtgctccgtactgccaacccactggcgatgtaacaaaacactccctatagcttttaaagtagtggccctaggagacgttccagacggcaccctcgtcaccgtcatggccggcaacgacgaaaactacagcgccgaactacgcaacgcaactgccgccatgaaaaatcaagtggccagattcaacgacctccgcttcgtcggccgcagcggaagaggaaaatcgttcaccttaaccatcacagttttcacaaacccaccccaggttgcaacatatcaccgagccatcaaaatcactgttgacggcccacgtgaaccaagacggcatcgtcaaaaactagacgaccaaacaaaaccaggttcactctcattttcagaacgcctctcagaactcgaacaactacgacgaaccgctatgcgcgtctcaccccaccaccccgccccgaccccgaacccacgagcatctctgaaccacagcacagccttcaacccacaaccacagtcccaaatgcaagttggacccgagaaacgagtcccagctatgccgggcagccccgtcgaggtcaaaatccaatcgcgcagcagccctcccacaatgcccccactaccacccatcaacccaggcggtccccgccccgtctcattcaccccaacagccctctcaaatggaatcaaccacagccctcccaccctcaacggtgccccctccccaccacaacgcttttcaaacggaccagcgtcctccacctccagcgctctcactaaccaacaactcccagcaacttgcggagccagacaactcagcaaactaaaaagattcctcaccaccctacaacagttcggaaacgacatctcccccgaaataggcgagaaagttcgcactcttgtactagcccttgtaaactccacagtaactatcgaagagttccactgcaaactacaagaagcaaccaacttcccactccgccccttcgtgatcccattcctaaaagcaaacctaccactactccaacgcgaactgctccactgcgcccgtgccgcaaaacagactccctcacaatacctcgcccaacatgaacatcttctcctcaacacatcaattgctagcccagcagactcatccgaacttctcatggaagtccacggaaacggtaaacgaccatctcccgaacgacgcgaagaaaactccttcgaccgcgacaccatcgcccccgaaccacccgccaaacgcgtatgcacaatatcaccggccccgcgccactcccctgcacttaccgtaccccttatgaacccagggggccaattccaccctacacccccacccctgcagcactacactctagaagacattgcaacaagccacctataccgagaacctaacaaaatgctagaacacagagaagtgcgtgaccgccaccacagcctcggcttaaacgggggctaccaagacgaactcgttgatcaccgcctcaccgaacgagagtgggcagatgaatggaaacacctggaccacgccctaaactgcatcatggaaatggtcgagaaaaccagacgatcaatggccgtcctaagaaggtgccaagaatcagacagagaagaactcaactattggaaacgacgatataacgaaaacaccgaactcagaaaaacaggcactgaactcgtctcgagacaacactcaccaggctctgcagactctctttccaacgactcacaacgcgagttcaatagccgaccaggcaccggctacgtccccgtcgaattttggaagaaaaccgaagaagccgtaaacaaagtcaaaatacaagcaatgtccgaagtccaaaaagccgtcgccgaagcagaacaaaaagccttcgaggttatcgcgaccgaacgcgcccgtatggaacagacaatagccgacgtcaaacgacaggctgccgaagacgctttcctcgttatcaacgaacaagaagaatcaactgaaaactgctggaactgcggccggaaagcgtccgaaacctgctcaggctgcaacatcgctcgttattgcggctccttttgccaacataaagactgggagcgccaccaccgcctatgcggccaaaacctacacggccaaagcccccacggacaaggccgacctctcctacccgtaggccgaggctcctccgcacgctccgccgactgcagcgtccccagccccgcactcgacaaaacttcggcaaccacatcccgcagcagcacccccgcgagcgttacagccatcgacacaaacggactataaggactagtccctgttcccagagcccacttttttttctttttttgaaataaaatagcctgtctttcagatctaaaaaaaaaaaaaaaaaaaaaaaaaaaaaaaaaaaaaaaaaaaaaaaaaaaaaaaaaaaaaaaaaaaaaaaaaaaaaaaaaaaaaaaaaaaaaaaaaaaagaatt

SEQ ID NO: 1427 - RNA, 2731 nt, synthetic construct
  misc_feature 1..2731: note = Artificial____RUNX1(1-241)_I_RUNX1T1b(22-604) mRNA opt11
  source 1..2731: mol_type = other RNA
aggagagtcccgcagtcggcgtccagcggctctgcttgttcgtgtgtgtgtcgttgcaggccttattcaagcttaccatgaggatacccgtcgacgcctccacgtcacgccgcttcacacccccaagcaccgccctatcacccggcaaaatgtccgaagctctaccactaggtgcgccagacgcaggcgctgctctcgccggaaaactacgatccggggaccgatccatggtcgaagtcctcgctgatcaccccggcgaacttgtccgcacagactccccaaacttcctctgctccgtactcccgactcactggcgttgcaacaaaacacttcctattgcgttcaaggtcgtagccctaggggacgtccccgacggcaccttagtcacagtcatggcgggtaacgacgagaactactcagccgaattacgcaacgctacagcagccatgaaaaaccaggtagctcgcttcaacgacctccggttcgtcggtagaagcggccgaggaaaatcttttaccctcacaatcaccgtgttcaccaacccaccccaagtcgccacctaccaccgggcaatcaaaatcacagttgacggaccccgcgagccccgacgccatcgccaaaaacttgacgaccaaaccaaaccaggatcactatccttctcagagcgactctcagaactcgaacaattacgccggaccgcaatgcgtgtctcaccccaccacccggcccccacgcccaacccccgcgcctcactcaaccactccactgctttcaacccgcaaccccaatcccaaatgcagatcggcccagaaaaacgcgttcccgccatgccaggaagtcccgtcgaagtcaaaatccaatccagatcttccccaccaaccatgcctcccctcccgcccataaacccgggaggtccccgacccgtgtccttcacccccaccgccctctcgaacggcatcaaccactcaccacctaccctaaacggagcaccatccccaccccaacgcttctcaaacggacctgcatcctccacatcgtccgccctcaccaaccaacaactcccagccacatgcggcgcccgtcaactatctaagctaaaacgcttcctaaccactctccagcaatttggcaacgacatatcccccgaaatcggcgaaaaagtccgcacactcgtcttagccctcgtcaattccaccgtcaccatagaagagttccactgcaaactccaagaagccacaaacttcccactccgtccctttgtcatcccattcttaaaggcgaacctaccactactccaaagagaactactccactgcgctcgggccgcaaaacaaacccctagccagtacctagcccaacacgaacatctactactcaacactagcatcgcctcacccgcagactcatctgaactacttatggaagtccacggcaacggcaaacgcccctccccagaaaggcgcgaagaaaactccttcgatcgagacacaatagcacccgaaccacccgccaaacgcgtatgcaccatcagcccagcaccccgacactccccagccctcacggtccctctaatgaacccgggcggacaattccaccccaccccaccacccctacaacactacacattagaagacatagccacatctcacctctaccgcgaacccaataaaatgctggaacaccgcgaagtccgagatagacaccattctctaggactaaatggaggctaccaagacgaacttgtcgaccacagactcacagaacgcgaatgggccgacgaatggaagcacctcgatcatgcccttaactgtatcatggagatggtagagaaaacaagacgatccatggcagttctacgtcgatgccaagagagcgaccgcgaagaactcaactactggaaacgccgctacaacgaaaacacagaactacgaaaaaccggcaccgaactcgtctcccgtcagcactccccgggaagcgccgactcccttagcaacgactcacaacgcgagttcaactctcgccccggaacaggctacgttcctgtcgagttctggaagaaaactgaagaagccgtaaacaaagtcaaaatccaagccatgtcagaagtccaaaaagccgtagcagaagccgaacaaaaggctttcgaagtaattgcaaccgaacgcgcacgtatggaacaaaccatagcagatgtaaaaagacaagccgccgaagacgccttcctcgtcataaacgaacaagaagaatccaccgaaaactgttggaactgcggccgtaaagcctccgaaacatgttctggctgcaacattgcccgttactgtgggtccttctgccaacacaaagattgggaacgccaccaccgcctctgcggacaaaacctccacggccaaagcccccatggtcaaggtagaccactactacccgttggacgcggctccagcgcacgatcagccgactgctcagtgccatcccccgcccttgacaaaacctccgccacaacctcgcgatcatccacaccagcctcagtaacagccatagacaccaacgggctttgaggactagtccctgttcccagagcccacttttttttctttttttgaaataaaatagcctgtctttcagatctaaaaaaaaaaaaaaaaaaaaaaaaaaaaaaaaaaaaaaaaaaaaaaaaaaaaaaaaaaaaaaaaaaaaaaaaaaaaaaaaaaaaaaaaaaaaaaaaaaaagaatt

SEQ ID NO: 1428 - RNA, 1621 nt, synthetic construct
  misc_feature 1..1621: note = Homo sapiens__Q01196-1__RUNX1(K83E_R174Q) mRNA wt
  source 1..1621: mol_type = other RNA
aggagagtcccgcagtcggcgtccagcggctctgcttgttcgtgtgtgtgtcgttgcaggccttattcaagcttaccatgcgtatccccgtagatgccagcacgagccgccgcttcacgccgccttccaccgcgctgagcccaggcaagatgagcgaggcgttgccgctgggcgccccggacgccggcgctgccctggccggcaagctgaggagcggcgaccgcagcatggtggaggtgctggccgaccacccgggcgagctggtgcgcaccgacagccccaacttcctctgctccgtgctgcctacgcactggcgctgcaacgagaccctgcccatcgctttcaaggtggtggccctaggggatgttccagatggcactctggtcactgtgatggctggcaatgatgaaaactactcggctgagctgagaaatgctaccgcagccatgaagaaccaggttgcaagatttaatgacctcaggtttgtcggtcgaagtggaagagggaaaagcttcactctgaccatcactgtcttcacaaacccaccgcaagtcgccacctaccacagagccatcaaaatcacagtggatgggccccaggaacctcgaagacatcggcagaaactagatgatcagaccaagcccgggagcttgtccttttccgagcggctcagtgaactggagcagctgcggcgcacagccatgagggtcagcccacaccacccagcccccacgcccaaccctcgtgcctccctgaaccactccactgcctttaaccctcagcctcagagtcagatgcaggatacaaggcagatccaaccatccccaccgtggtcctacgatcagtcctaccaatacctgggatccattgcctctccttctgtgcacccagcaacgcccatttcacctggacgtgccagcggcatgacaaccctctctgcagaactttccagtcgactctcaacggcacccgacctgacagcgttcagcgacccgcgccagttccccgcgctgccctccatctccgacccccgcatgcactatccaggcgccttcacctactccccgacgccggtcacctcgggcatcggcatcggcatgtcggccatgggctcggccacgcgctaccacacctacctgccgccgccctaccccggctcgtcgcaagcgcagggaggcccgttccaagccagctcgccctcctaccacctgtactacggcgcctcggccggctcctaccagttctccatggtgggcggcgagcgctcgccgccgcgcatcctgccgccctgcaccaacgcctccaccggctccgcgctgctcaaccccagcctcccgaaccagagcgacgtggtggaggccgagggcagccacagcaactcccccaccaacatggcgccctccgcgcgcctggaggaggccgtgtggaggccctactgatgatgaggactagtccctgttcccagagcccacttttttttctttttttgaaataaaatagcctgtctttcagatctaaaaaaaaaaaaaaaaaaaaaaaaaaaaaaaaaaaaaaaaaaaaaaaaaaaaaaaaaaaaaaaaaaaaaaaaaaaaaaaaaaaaaaaaaaaaaaaaaaaagaatt

SEQ ID NO: 1429 - RNA, 2095 nt, synthetic construct
  misc_feature 1..2095: note = Homo sapiens____CBFbeta(1-165)_SMMHC(1527-1972) mRNA wt
  source 1..2095: mol_type = other RNA
aggagagtcccgcagtcggcgtccagcggctctgcttgttcgtgtgtgtgtcgttgcaggccttattcaagcttaccatgccgcgcgtcgtgcccgaccagagaagcaagttcgagaacgaggagttttttaggaagctgagccgcgagtgtgagattaagtacacgggcttcagggaccggccccacgaggaacgccaggcacgcttccagaacgcctgccgcgacggccgctcggaaatcgcttttgtggccacaggaaccaatctgtctctccagttttttccggccagctggcagggagaacagcgacaaacacctagccgagagtatgtcgacttagaaagagaagcaggcaaggtatatttgaaggctcccatgattctgaatggagtctgtgttatctggaaaggctggattgatctccaaagactggatggtatgggctgtctggagtttgatgaggagcgagcccagcaggaggatgcattagcacaacaggcctttgaagaggctcggagaaggacacgcgaatttgaagatagagacaggtctcatcgggaggaaatggaggtccatgagctggagaagtccaagcgggccctggagacccagatggaggagatgaagacgcagctggaagagctggaggacgagctgcaagccacggaggacgccaaactgcggctggaagtcaacatgcaggcgctcaagggccagttcgaaagggatctccaagcccgggacgagcagaatgaggagaagaggaggcaactgcagagacagcttcacgagtatgagacggaactggaagacgagcgaaagcaacgtgccctggcagctgcagcaaagaagaagctggaaggggacctgaaagacctggagcttcaggccgactctgccatcaaggggagggaggaagccatcaagcagctacgcaaactgcaggctcagatgaaggactttcaaagagagctggaagatgcccgtgcctccagagatgagatctttgccacagccaaagagaatgagaagaaagccaagagcttggaagcagacctcatgcagctacaagaggacctcgccgccgctgagagggctcgcaaacaagcggacctcgagaaggaggaactggcagaggagctggccagtagcctgtcgggaaggaacgcactccaggacgagaagcgccgcctggaggcccggatcgcccagctggaggaggagctggaggaggagcagggcaacatggaggccatgagcgaccgggtccgcaaagccacacagcaggccgagcagctcagcaacgagctggccacagagcgcagcacggcccagaagaatgagagtgcccggcagcagctcgagcggcagaacaaggagctccggagcaagctccacgagatggagggggccgtcaagtccaagttcaagtccaccatcgcggcgctggaggccaagattgcacagctggaggagcaggtcgagcaggaggccagagagaaacaggcggccaccaagtcgctgaagcagaaagacaagaagctgaaggaaatcttgctgcaggtggaggacgagcgcaagatggccgagcagtacaaggagcaggcagagaaaggcaatgccagggtcaagcagctcaagaggcagctggaggaggcagaggaggagtcccagcgcatcaacgccaaccgcaggaagctgcagcgggagctggatgaggccacggagagcaacgaggccatgggccgcgaggtgaacgcactcaagagcaagctcaggcgaggaaacgagacctctttcgttccttctagaaggtctggaggacgtagagttattgaaaatgcagatggttctgaggaggaaacggacactcgagacgcagacttcaatggaaccaaggccagtgaatgatgatgaggactagtccctgttcccagagcccacttttttttctttttttgaaataaaatagcctgtctttcagatctaaaaaaaaaaaaaaaaaaaaaaaaaaaaaaaaaaaaaaaaaaaaaaaaaaaaaaaaaaaaaaaaaaaaaaaaaaaaaaaaaaaaaaaaaaaaaaaaaaaagaatt

SEQ ID NO: 1430 - RNA, 1810 nt, synthetic construct
  misc_feature 1..1810: note = Artificial____CBFbeta(1-165)_SMMHC(1527-1877) mRNA wt
  source 1..1810: mol_type = other RNA
aggagagtcccgcagtcggcgtccagcggctctgcttgttcgtgtgtgtgtcgttgcaggccttattcaagcttaccatgccgcgcgtcgtgcccgaccagagaagcaagttcgagaacgaggagttttttaggaagctgagccgcgagtgtgagattaagtacacgggcttcagggaccggccccacgaggaacgccaggcacgcttccagaacgcctgccgcgacggccgctcggaaatcgcttttgtggccacaggaaccaatctgtctctccagttttttccggccagctggcagggagaacagcgacaaacacctagccgagagtatgtcgacttagaaagagaagcaggcaaggtatatttgaaggctcccatgattctgaatggagtctgtgttatctggaaaggctggattgatctccaaagactggatggtatgggctgtctggagtttgatgaggagcgagcccagcaggaggatgcattagcacaacaggcctttgaagaggctcggagaaggacacgcgaatttgaagatagagacaggtctcatcgggaggaaatggaggtccatgagctggagaagtccaagcgggccctggagacccagatggaggagatgaagacgcagctggaagagctggaggacgagctgcaagccacggaggacgccaaactgcggctggaagtcaacatgcaggcgctcaagggccagttcgaaagggatctccaagcccgggacgagcagaatgaggagaagaggaggcaactgcagagacagcttcacgagtatgagacggaactggaagacgagcgaaagcaacgtgccctggcagctgcagcaaagaagaagctggaaggggacctgaaagacctggagcttcaggccgactctgccatcaaggggagggaggaagccatcaagcagctacgcaaactgcaggctcagatgaaggactttcaaagagagctggaagatgcccgtgcctccagagatgagatctttgccacagccaaagagaatgagaagaaagccaagagcttggaagcagacctcatgcagctacaagaggacctcgccgccgctgagagggctcgcaaacaagcggacctcgagaaggaggaactggcagaggagctggccagtagcctgtcgggaaggaacgcactccaggacgagaagcgccgcctggaggcccggatcgcccagctggaggaggagctggaggaggagcagggcaacatggaggccatgagcgaccgggtccgcaaagccacacagcaggccgagcagctcagcaacgagctggccacagagcgcagcacggcccagaagaatgagagtgcccggcagcagctcgagcggcagaacaaggagctccggagcaagctccacgagatggagggggccgtcaagtccaagttcaagtccaccatcgcggcgctggaggccaagattgcacagctggaggagcaggtcgagcaggaggccagagagaaacaggcggccaccaagtcgctgaagcagaaagacaagaagctgaaggaaatcttgctgcaggtggaggacgagcgcaagatggccgagcagtacaaggagcaggcagagaaaggcaatgcctgatgatgaggactagtccctgttcccagagcccacttttttttctttttttgaaataaaatagcctgtctttcagatctaaaaaaaaaaaaaaaaaaaaaaaaaaaaaaaaaaaaaaaaaaaaaaaaaaaaaaaaaaaaaaaaaaaaaaaaaaaaaaaaaaaaaaaaaaaaaaaaaaaagaatt

SEQ ID NO: 1431 - RNA, 871 nt, synthetic construct
  misc_feature 1..871: note = Artificial____CBFbeta(1-165)_Linker_Lifeact mRNA wt
  source 1..871: mol_type = other RNA
aggagagtcccgcagtcggcgtccagcggctctgcttgttcgtgtgtgtgtcgttgcaggccttattcaagcttaccatgccgcgcgtcgtgcccgaccagagaagcaagttcgagaacgaggagttttttaggaagctgagccgcgagtgtgagattaagtacacgggcttcagggaccggccccacgaggaacgccaggcacgcttccagaacgcctgccgcgacggccgctcggaaatcgcttttgtggccacaggaaccaatctgtctctccagttttttccggccagctggcagggagaacagcgacaaacacctagccgagagtatgtcgacttagaaagagaagcaggcaaggtatatttgaaggctcccatgattctgaatggagtctgtgttatctggaaaggctggattgatctccaaagactggatggtatgggctgtctggagtttgatgaggagcgagcccagcaggaggatgcattagcacaacaggcctttgaagaggctcggagaaggacacgcgaatttgaagatagagacaggtctcatcgggaggaaatggagggcgggagcggcgggtccggcgggagcggcggctccgggggcgggggcgtggccgacctgatcaagaagttcgagagcatcagcaaggaggagggggatccaccggtcgccacctgatgatgaggactagtccctgttcccagagcccacttttttttctttttttgaaataaaatagcctgtctttcagatctaaaaaaaaaaaaaaaaaaaaaaaaaaaaaaaaaaaaaaaaaaaaaaaaaaaaaaaaaaaaaaaaaaaaaaaaaaaaaaaaaaaaaaaaaaaaaaaaaaaagaatt

SEQ ID NO: 1432 - RNA, 838 nt, synthetic construct
  misc_feature 1..838: note = Artificial____CBFbeta(1-165)_HIF1alpha(549-575) mRNA wt
  source 1..838: mol_type = other RNA
aggagagtcccgcagtcggcgtccagcggctctgcttgttcgtgtgtgtgtcgttgcaggccttattcaagcttaccatgccgcgcgtcgtgcccgaccagagaagcaagttcgagaacgaggagttttttaggaagctgagccgcgagtgtgagattaagtacacgggcttcagggaccggccccacgaggaacgccaggcacgcttccagaacgcctgccgcgacggccgctcggaaatcgcttttgtggccacaggaaccaatctgtctctccagttttttccggccagctggcagggagaacagcgacaaacacctagccgagagtatgtcgacttagaaagagaagcaggcaaggtatatttgaaggctcccatgattctgaatggagtctgtgttatctggaaaggctggattgatctccaaagactggatggtatgggctgtctggagtttgatgaggagcgagcccagcaggaggatgcattagcacaacaggcctttgaagaggctcggagaaggacacgcgaatttgaagatagagacaggtctcatcgggaggaaatggagccattttctactcaggacacagatttagacttggagatgttagctccctatatcccaatggatgatgacttccagttacgttgatgatgaggactagtccctgttcccagagcccacttttttttctttttttgaaataaaatagcctgtctttcagatctaaaaaaaaaaaaaaaaaaaaaaaaaaaaaaaaaaaaaaaaaaaaaaaaaaaaaaaaaaaaaaaaaaaaaaaaaaaaaaaaaaaaaaaaaaaaaaaaaaaagaatt

SEQ ID NO: 1433 - RNA, 883 nt, synthetic construct
  misc_feature 1..883: note Artificial____CBFbeta(1-165)_Linker_HIF1alpha(549-575) mRNA wt
  source 1..883: mol_type = other RNA
aggagagtcccgcagtcggcgtccagcggctctgcttgttcgtgtgtgtgtcgttgcaggccttattcaagcttaccatgccgcgcgtcgtgcccgaccagagaagcaagttcgagaacgaggagttttttaggaagctgagccgcgagtgtgagattaagtacacgggcttcagggaccggccccacgaggaacgccaggcacgcttccagaacgcctgccgcgacggccgctcggaaatcgcttttgtggccacaggaaccaatctgtctctccagttttttccggccagctggcagggagaacagcgacaaacacctagccgagagtatgtcgacttagaaagagaagcaggcaaggtatatttgaaggctcccatgattctgaatggagtctgtgttatctggaaaggctggattgatctccaaagactggatggtatgggctgtctggagtttgatgaggagcgagcccagcaggaggatgcattagcacaacaggcctttgaagaggctcggagaaggacacgcgaatttgaagatagagacaggtctcatcgggaggaaatggagggcgggagcggcgggtccggcgggagcggcggctccgggggcgggccattttctactcaggacacagatttagacttggagatgttagctccctatatcccaatggatgatgacttccagttacgttgatgatgaggactagtccctgttcccagagcccacttttttttctttttttgaaataaaatagcctgtctttcagatctaaaaaaaaaaaaaaaaaaaaaaaaaaaaaaaaaaaaaaaaaaaaaaaaaaaaaaaaaaaaaaaaaaaaaaaaaaaaaaaaaaaaaaaaaaaaaaaaaaaagaatt

SEQ ID NO: 1434 - RNA, 2518 nt, synthetic construct
  misc_feature 1..2518: note = Artificial____RUNX1(1-177)_N_RUNX1T1a(31-604) mRNA wt
  source 1..2518: mol_type = other RNA
aggagagtcccgcagtcggcgtccagcggctctgcttgttcgtgtgtgtgtcgttgcaggccttattcaagcttaccatgcgtatccccgtagatgccagcacgagccgccgcttcacgccgccttccaccgcgctgagcccaggcaagatgagcgaggcgttgccgctgggcgccccggacgccggcgctgccctggccggcaagctgaggagcggcgaccgcagcatggtggaggtgctggccgaccacccgggcgagctggtgcgcaccgacagccccaacttcctctgctccgtgctgcctacgcactggcgctgcaacaagaccctgcccatcgctttcaaggtggtggccctaggggatgttccagatggcactctggtcactgtgatggctggcaatgatgaaaactactcggctgagctgagaaatgctaccgcagccatgaagaaccaggttgcaagatttaatgacctcaggtttgtcggtcgaagtggaagagggaaaagcttcactctgaccatcactgtcttcacaaacccaccgcaagtcgccacctaccacagagccatcaaaatcacagtggatgggccccgagaacctcgaaaccgtactgagaagcactccacaatgccagactcacctgtggatgtgaagacgcaatctaggctgactcctccaacaatgccacctcccccaactactcaaggagctccaagaaccagttcatttacaccgacaacgttaactaatggcacgagccattctcctacagccttgaatggcgccccctcaccacccaatggcttcagcaatgggccttcctcttcttcctcctcctctctggctaatcaacagctgcccccagcctgtggtgccaggcaactcagcaagctgaaaaggttccttactaccctgcagcagtttggcaatgacatttcacccgagataggagaaagagttcgcaccctcgttctgggactagtgaactccactttgacaattgaagaatttcattccaaactgcaagaagctactaacttcccactgagaccttttgtcatcccatttttgaaggccaacttgcccctgctgcagcgtgagctcctccactgcgcaagactggccaaacagaaccctgcccagtacctcgcccagcatgaacagctgcttctggatgccagcaccacctcacctgttgactcctcagagctgcttctcgatgtgaacgaaaacgggaagaggcgaactccagacagaaccaaagaaaatggctttgacagagagcctttgcactcagaacatccaagcaagcgaccatgcactattagcccaggccagcggtacagtccaaataacggcttatcctaccagcccaatggcctgcctcaccctaccccacctccacctcagcattaccgtttggatgatatggccattgcccaccactacagggactcctatcgacaccccagccacagggacctcagggacagaaacagacctatggggttgcatggcacacgtcaagaagaaatgattgatcacagactaacagacagagaatgggcagaagagtggaaacatcttgaccatctgttaaactgcataatggacatggtagaaaaaacaaggcgatctctcaccgtactaaggcggtgtcaagaagcagaccgggaagaattgaattactggatccggcggtacagtgacgccgaggacttaaaaaaaggtggcggcagtagcagcagccactctaggcagcagagtcccgtcaacccagacccagttgcactagacgcgcatcgggaattccttcacaggcctgcgtctggatacgtgccagaggagatctggaagaaagctgaggaggccgtcaatgaggtgaagcgccaggcgatgacggagctgcagaaggccgtgtctgaggcggagcggaaagcccacgacatgatcacaacagagagggccaagatggagcgcacggtcgccgaggccaaacggcaggcggcggaggacgcactggcagttatcaatcagcaggaggattcaagcgagagttgctggaattgtggccgtaaagcgagtgaaacctgcagtggctgtaacacagcccgatactgtggctcattttgccagcacaaagactgggagaagcaccatcacatctgtggacagaccctgcaggcccagcagcagggagacacacctgcagtcagctcctctgtcacgcccaacagcggggctgggagcccgatggacacaccaccagcagccactccgaggtcaaccaccccgggaaccccttccaccatagagacaacccctcgctgatgatgaggactagtccctgttcccagagcccacttttttttctttttttgaaataaaatagcctgtctttcagatctaaaaaaaaaaaaaaaaaaaaaaaaaaaaaaaaaaaaaaaaaaaaaaaaaaaaaaaaaaaaaaaaaaaaaaaaaaaaaaaaaaaaaaaaaaaaaaaaaaaagaatt

SEQ ID NO: 1435 - RNA, 1033 nt, synthetic construct
  misc_feature 1..1033: note = Artificial____RUNX1(1-241)_RUNX1T1b(short) mRNA wt
  source 1..1033: mol_type = other RNA
aggagagtcccgcagtcggcgtccagcggctctgcttgttcgtgtgtgtgtcgttgcaggccttattcaagcttaccatgcgtatccccgtagatgccagcacgagccgccgcttcacgccgccttccaccgcgctgagcccaggcaagatgagcgaggcgttgccgctgggcgccccggacgccggcgctgccctggccggcaagctgaggagcggcgaccgcagcatggtggaggtgctggccgaccacccgggcgagctggtgcgcaccgacagccccaacttcctctgctccgtgctgcctacgcactggcgctgcaacaagaccctgcccatcgctttcaaggtggtggccctaggggatgttccagatggcactctggtcactgtgatggctggcaatgatgaaaactactcggctgagctgagaaatgctaccgcagccatgaagaaccaggttgcaagatttaatgacctcaggtttgtcggtcgaagtggaagagggaaaagcttcactctgaccatcactgtcttcacaaacccaccgcaagtcgccacctaccacagagccatcaaaatcacagtggatgggccccgagaacctcgaagacatcggcagaaactagatgatcagaccaagcccgggagcttgtccttttccgagcggctcagtgaactggagcagctgcggcgcacagccatgagggtcagcccacaccacccagcccccacgcccaaccctcgtgcctccctgaaccactccactgcctttaaccctcagcctcagagtcagatgcaggaggtgggcttctgccacgtcgcccaggtggggctgaagctcctgggctgatgatgaggactagtccctgttcccagagcccacttttttttctttttttgaaataaaatagcctgtctttcagatctaaaaaaaaaaaaaaaaaaaaaaaaaaaaaaaaaaaaaaaaaaaaaaaaaaaaaaaaaaaaaaaaaaaaaaaaaaaaaaaaaaaaaaaaaaaaaaaaaaaagaatt

SEQ ID NO: 1436 - RNA, 2737 nt, synthetic construct
  misc_feature 1..2737: note = Artificial____RUNX1(1-241)_V_RUNX1T1b(22-604) mRNA wt
  source 1..2737: mol_type = other RNA
aggagagtcccgcagtcggcgtccagcggctctgcttgttcgtgtgtgtgtcgttgcaggccttattcaagcttaccatgcgtatccccgtagatgccagcacgagccgccgcttcacgccgccttccaccgcgctgagcccaggcaagatgagcgaggcgttgccgctgggcgccccggacgccggcgctgccctggccggcaagctgaggagcggcgaccgcagcatggtggaggtgctggccgaccacccgggcgagctggtgcgcaccgacagccccaacttcctctgctccgtgctgcctacgcactggcgctgcaacaagaccctgcccatcgctttcaaggtggtggccctaggggatgttccagatggcactctggtcactgtgatggctggcaatgatgaaaactactcggctgagctgagaaatgctaccgcagccatgaagaaccaggttgcaagatttaatgacctcaggtttgtcggtcgaagtggaagagggaaaagcttcactctgaccatcactgtcttcacaaacccaccgcaagtcgccacctaccacagagccatcaaaatcacagtggatgggccccgagaacctcgaagacatcggcagaaactagatgatcagaccaagcccgggagcttgtccttttccgagcggctcagtgaactggagcagctgcggcgcacagccatgagggtcagcccacaccacccagcccccacgcccaaccctcgtgcctccctgaaccactccactgcctttaaccctcagcctcagagtcagatgcaggtgggtcctgagaaaagggtgccagcgatgcctggatcgcctgtggaagtgaagatacagtccagatcctcacctcccaccatgccacccctcccaccaataaatcctggaggaccgaggccagtgtccttcactcctactgcattaagcaatggcatcaaccattctcctcctaccctgaatggtgccccatcaccgccacagagattcagcaatggtcctgcctcctccacatcatctgcactcacaaatcagcaattgccagccacttgtggtgctcgacaactcagcaagttgaaacgctttcttaccactctgcaacagtttggcaatgacatctcccctgagattggggagaaggtgcggactcttgttcttgcactggtgaactcaacagtgacaattgaggaattccactgtaagctccaagaagccacaaactttccccttcgtccttttgtgattccatttctcaaggccaacctgcccctgctgcagcgggaactgctgcactgcgctcgggcggccaagcagaccccatcccagtacctggctcagcacgaacaccttctgctcaacacaagcattgcatcgcctgctgactcgtcagagttgctcatggaggtgcacggaaatgggaagaggcccagtccagagaggagagaagagaatagttttgatagagacacaattgctcctgagcctcctgccaagagagtatgtaccatcagccctgctcctcggcacagtcctgctctcactgtgcccctcatgaatcccgggggccaattccatcctacccctccacctcttcagcattacaccttagaggatattgcaacttctcacctgtatcgggaacccaacaagatgctagagcatcgagaagttcgtgatagacaccacagtcttggtctaaatggaggctatcaagatgagttggtagatcatcgtttgacagaaagggaatgggctgatgaatggaaacatcttgaccatgcgctgaattgcattatggaaatggtagagaaaacaaggcgctctatggcagttctgcggcgctgtcaggaatcagatcgtgaagaactcaactactggaaaagacggtacaatgaaaacacagagctgaggaaaacggggaccgagttggtctccaggcagcacagccctgggagtgcagattctctcagcaatgattctcagagagagttcaacagcaggccaggtacaggatacgtacctgtggagttttggaaaaaaacagaagaagctgtgaataaggtgaaaattcaggccatgtcagaagtacagaaggccgtcgctgaggcagagcagaaagcctttgaagtgattgcaacagagagagcacgaatggagcaaaccatagcggatgtcaagcggcaggccgcagaggatgctttcctcgtcatcaatgagcaagaggagtccacggagaactgctggaactgtggccgcaaagccagcgagacatgcagtggctgcaatatcgcgcgatactgtggctctttctgccagcacaaggactgggagcggcaccaccgcctctgtggtcagaacctgcatggccagagcccccacggccagggccggccgctgcttcctgtaggcaggggctcctctgccaggtccgccgactgcagcgtgcccagcccagccctcgacaagacctcggcaaccacatcgcgttcctcaacacctgcttctgtgacagctatcgacaccaacggactctgatgatgaggactagtccctgttcccagagcccacttttttttctttttttgaaataaaatagcctgtctttcagatctaaaaaaaaaaaaaaaaaaaaaaaaaaaaaaaaaaaaaaaaaaaaaaaaaaaaaaaaaaaaaaaaaaaaaaaaaaaaaaaaaaaaaaaaaaaaaaaaaaaagaatt

SEQ ID NO: 1437 - RNA, 2737 nt, synthetic construct
  misc_feature 1..2737: note = Artificial____RUNX1(1-241)_I_RUNX1T1b(22-604) mRNA wt
  source 1..2737: mol_type = other RNA
aggagagtcccgcagtcggcgtccagcggctctgcttgttcgtgtgtgtgtcgttgcaggccttattcaagcttaccatgcgtatccccgtagatgccagcacgagccgccgcttcacgccgccttccaccgcgctgagcccaggcaagatgagcgaggcgttgccgctgggcgccccggacgccggcgctgccctggccggcaagctgaggagcggcgaccgcagcatggtggaggtgctggccgaccacccgggcgagctggtgcgcaccgacagccccaacttcctctgctccgtgctgcctacgcactggcgctgcaacaagaccctgcccatcgctttcaaggtggtggccctaggggatgttccagatggcactctggtcactgtgatggctggcaatgatgaaaactactcggctgagctgagaaatgctaccgcagccatgaagaaccaggttgcaagatttaatgacctcaggtttgtcggtcgaagtggaagagggaaaagcttcactctgaccatcactgtcttcacaaacccaccgcaagtcgccacctaccacagagccatcaaaatcacagtggatgggccccgagaacctcgaagacatcggcagaaactagatgatcagaccaagcccgggagcttgtccttttccgagcggctcagtgaactggagcagctgcggcgcacagccatgagggtcagcccacaccacccagcccccacgcccaaccctcgtgcctccctgaaccactccactgcctttaaccctcagcctcagagtcagatgcagatcggtcctgagaaaagggtgccagcgatgcctggatcgcctgtggaagtgaagatacagtccagatcctcacctcccaccatgccacccctcccaccaataaatcctggaggaccgaggccagtgtccttcactcctactgcattaagcaatggcatcaaccattctcctcctaccctgaatggtgccccatcaccgccacagagattcagcaatggtcctgcctcctccacatcatctgcactcacaaatcagcaattgccagccacttgtggtgctcgacaactcagcaagttgaaacgctttcttaccactctgcaacagtttggcaatgacatctcccctgagattggggagaaggtgcggactcttgttcttgcactggtgaactcaacagtgacaattgaggaattccactgtaagctccaagaagccacaaactttccccttcgtccttttgtgattccatttctcaaggccaacctgcccctgctgcagcgggaactgctgcactgcgctcgggcggccaagcagaccccatcccagtacctggctcagcacgaacaccttctgctcaacacaagcattgcatcgcctgctgactcgtcagagttgctcatggaggtgcacggaaatgggaagaggcccagtccagagaggagagaagagaatagttttgatagagacacaattgctcctgagcctcctgccaagagagtatgtaccatcagccctgctcctcggcacagtcctgctctcactgtgcccctcatgaatcccgggggccaattccatcctacccctccacctcttcagcattacaccttagaggatattgcaacttctcacctgtatcgggaacccaacaagatgctagagcatcgagaagttcgtgatagacaccacagtcttggtctaaatggaggctatcaagatgagttggtagatcatcgtttgacagaaagggaatgggctgatgaatggaaacatcttgaccatgcgctgaattgcattatggaaatggtagagaaaacaaggcgctctatggcagttctgcggcgctgtcaggaatcagatcgtgaagaactcaactactggaaaagacggtacaatgaaaacacagagctgaggaaaacggggaccgagttggtctccaggcagcacagccctgggagtgcagattctctcagcaatgattctcagagagagttcaacagcaggccaggtacaggatacgtacctgtggagttttggaaaaaaacagaagaagctgtgaataaggtgaaaattcaggccatgtcagaagtacagaaggccgtcgctgaggcagagcagaaagcctttgaagtgattgcaacagagagagcacgaatggagcaaaccatagcggatgtcaagcggcaggccgcagaggatgctttcctcgtcatcaatgagcaagaggagtccacggagaactgctggaactgtggccgcaaagccagcgagacatgcagtggctgcaatatcgcgcgatactgtggctctttctgccagcacaaggactgggagcggcaccaccgcctctgtggtcagaacctgcatggccagagcccccacggccagggccggccgctgcttcctgtaggcaggggctcctctgccaggtccgccgactgcagcgtgcccagcccagccctcgacaagacctcggcaaccacatcgcgttcctcaacacctgcttctgtgacagctatcgacaccaacggactctgatgatgaggactagtccctgttcccagagcccacttttttttctttttttgaaataaaatagcctgtctttcagatctaaaaaaaaaaaaaaaaaaaaaaaaaaaaaaaaaaaaaaaaaaaaaaaaaaaaaaaaaaaaaaaaaaaaaaaaaaaaaaaaaaaaaaaaaaaaaaaaaaaagaatt

SEQ ID NO: 1438 - RNA, 1621 nt, synthetic construct
  misc_feature 1..1621: note = Homo sapiens__Q01196-1__RUNX1(K83E_R174Q) mRNA wt mod
  source 1..1621: mol_type = other RNA
aggagagtcccgcagtcggcgtccagcggctctgcttgttcgtgtgtgtgtcgttgcaggccttattcaagcttaccatgcgtatccccgtagatgccagcacgagccgccgcttcacgccgccttccaccgcgctgagcccaggcaagatgagcgaggcgttgccgctgggcgccccggacgccggcgctgccctggccggcaagctgaggagcggcgaccgcagcatggtggaggtgctggccgaccacccgggcgagctggtgcgcaccgacagccccaacttcctctgctccgtgctgcctacgcactggcgctgcaacgagaccctgcccatcgctttcaaggtggtggccctaggggatgttccagatggcactctggtcactgtgatggctggcaatgatgaaaactactcggctgagctgagaaatgctaccgcagccatgaagaaccaggttgcaagatttaatgacctcaggtttgtcggtcgaagtggaagagggaaaagtttcactctgaccatcactgtcttcacaaacccaccgcaagtcgccacctaccacagagccatcaaaatcacagtggatgggccccaggaacctcgaagacatcggcagaaactagatgatcagaccaagcccgggagcttgtccttttccgagcggctcagtgaactggagcagctgcggcgcacagccatgagggtcagcccacaccacccagcccccacgcccaaccctcgtgcctccctgaaccactccactgcctttaaccctcagcctcagagtcagatgcaggatacaaggcagatccaaccatccccaccgtggtcctacgatcagtcctaccaatacctgggatccattgcctctccttctgtgcacccagcaacgcccatttcacctggacgtgccagcggcatgacaaccctctctgcagaactttccagtcgactctcaacggcacccgacctgacagcgttcagcgacccgcgccagttccccgcgctgccctccatctccgacccccgcatgcactatccaggcgccttcacctactccccgacgccggtcacctcgggcatcggcatcggcatgtcggccatgggctcggccacgcgctaccacacctacctgccgccgccctaccccggctcgtcgcaagcgcagggaggcccgttccaagccagctcgccctcctaccacctgtactacggcgcctcggccggctcctaccagttctccatggtgggcggcgagcgctcgccgccgcgcatcctgccgccctgcaccaacgcctccaccggctccgcgctgctcaaccccagcctcccgaaccagagcgacgtggtggaggccgagggcagccacagcaactcccccaccaacatggcgccctccgcgcgcctggaggaggccgtgtggaggccctactgatgatgaggactagtccctgttcccagagcccacttttttttctttttttgaaataaaatagcctgtctttcagatctaaaaaaaaaaaaaaaaaaaaaaaaaaaaaaaaaaaaaaaaaaaaaaaaaaaaaaaaaaaaaaaaaaaaaaaaaaaaaaaaaaaaaaaaaaaaaaaaaaaagaatt

SEQ ID NO: 1439 - RNA, 2095 nt, synthetic construct
  misc_feature 1..2095: note = Homo sapiens____CBFbeta(1-165)_SMMHC(1527-1972) mRNA wt mod
  source 1..2095: mol_type = other RNA
aggagagtcccgcagtcggcgtccagcggctctgcttgttcgtgtgtgtgtcgttgcaggccttattcaagcttaccatgccgcgcgtcgtgcccgaccagagaagcaagtttgagaacgaggagttctttaggaagctgagccgcgagtgtgagattaagtacacgggctttagggaccggccccacgaggaacgccaggcacgcttccagaacgcctgccgcgacggccgctcggaaatcgcttttgtggccacaggaaccaatctgtctctccagttctttccggccagctggcagggagaacagcgacaaacacctagccgagagtatgtcgacttagaaagagaagcaggcaaggtatatttgaaggctcccatgattctgaatggagtctgtgttatctggaaaggctggattgatctccaaagactggatggtatgggctgtctggagtttgatgaggagcgagcccagcaggaggatgcattagcacaacaggcctttgaagaggctcggagaaggacacgcgaatttgaagatagagacaggtctcatcgggaggaaatggaggtccatgagctggagaagtccaagcgggccctggagacccagatggaggagatgaagacgcagctggaggaactggaggacgagctgcaagccacggaggacgccaaactgcggctggaagtcaacatgcaggcgctcaagggccagttcgaaagggatctccaagcccgggacgagcagaatgaggagaagaggaggcaactgcagagacagcttcacgagtatgagacggaactggaagacgagcgaaagcaacgtgccctggcagctgcagcaaagaagaagctggaaggggacctgaaagacctggagcttcaggccgactctgccatcaaggggagggaggaagccatcaagcagctacgcaaactgcaggctcagatgaaggactttcaaagagagctggaagatgcccgtgcctccagagatgagatctttgccacagccaaagagaatgagaagaaagccaagagcttggaagcagacctcatgcagctacaagaggacctcgccgccgctgagagggctcgcaaacaagcggacctcgagaaggaggaactggcagaggagctggccagtagcctgtcgggaaggaacgcactccaggacgagaagcgccgcctggaggcccggatcgcccagctggaggaggagctggaggaggagcagggcaacatggaggccatgagcgaccgggtccgcaaagccacacagcaggccgagcagctcagcaacgagctggccacagagcgcagcacggcccagaagaatgagagtgcccggcagcagctcgagcggcagaacaaggagctccggagcaagctccacgagatggagggggccgtcaagtccaagttcaagtccaccatcgcggcgctggaggccaagattgcacagctggaggagcaggtcgagcaggaggccagagagaaacaggcggccaccaagtcgctgaagcagaaagacaagaagctgaaggaaatcttgctccaggtggaggacgagcgcaagatggccgagcagtacaaggagcaggcagagaaaggcaatgccagggtcaagcagctgaagaggcagctggaggaggcagaggaggagtcccagcgcatcaacgccaaccgcaggaagctgcagcgggagctggatgaggccacggagagcaacgaggccatgggccgcgaggtgaacgcactcaagagcaagctcaggcgaggaaacgagacctctttcgttccttctagaaggtctggaggacgtagagttattgaaaatgcagatggttctgaggaggaaacggacactcgagacgcagacttcaatggaaccaaggccagtgaatgatgatgaggactagtccctgttcccagagcccacttttttttctttttttgaaataaaatagcctgtctttcagatctaaaaaaaaaaaaaaaaaaaaaaaaaaaaaaaaaaaaaaaaaaaaaaaaaaaaaaaaaaaaaaaaaaaaaaaaaaaaaaaaaaaaaaaaaaaaaaaaaaaagaatt

SEQ ID NO: 1440 - RNA, 1810 nt, synthetic construct
  misc_feature 1..1810: note = Artificial____CBFbeta(1-165)_SMMHC(1527-1877) mRNA wt mod
  source 1..1810: mol_type = other RNA
aggagagtcccgcagtcggcgtccagcggctctgcttgttcgtgtgtgtgtcgttgcaggccttattcaagcttaccatgccgcgcgtcgtgcccgaccagagaagcaagtttgagaacgaggagttctttaggaagctgagccgcgagtgtgagattaagtacacgggctttagggaccggccccacgaggaacgccaggcacgcttccagaacgcctgccgcgacggccgctcggaaatcgcttttgtggccacaggaaccaatctgtctctccagttctttccggccagctggcagggagaacagcgacaaacacctagccgagagtatgtcgacttagaaagagaagcaggcaaggtatatttgaaggctcccatgattctgaatggagtctgtgttatctggaaaggctggattgatctccaaagactggatggtatgggctgtctggagtttgatgaggagcgagcccagcaggaggatgcattagcacaacaggcctttgaagaggctcggagaaggacacgcgaatttgaagatagagacaggtctcatcgggaggaaatggaggtccatgagctggagaagtccaagcgggccctggagacccagatggaggagatgaagacgcagctggaggaactggaggacgagctgcaagccacggaggacgccaaactgcggctggaagtcaacatgcaggcgctcaagggccagttcgaaagggatctccaagcccgggacgagcagaatgaggagaagaggaggcaactgcagagacagcttcacgagtatgagacggaactggaagacgagcgaaagcaacgtgccctggcagctgcagcaaagaagaagctggaaggggacctgaaagacctggagcttcaggccgactctgccatcaaggggagggaggaagccatcaagcagctacgcaaactgcaggctcagatgaaggactttcaaagagagctggaagatgcccgtgcctccagagatgagatctttgccacagccaaagagaatgagaagaaagccaagagcttggaagcagacctcatgcagctacaagaggacctcgccgccgctgagagggctcgcaaacaagcggacctcgagaaggaggaactggcagaggagctggccagtagcctgtcgggaaggaacgcactccaggacgagaagcgccgcctggaggcccggatcgcccagctggaggaggagctggaggaggagcagggcaacatggaggccatgagcgaccgggtccgcaaagccacacagcaggccgagcagctcagcaacgagctggccacagagcgcagcacggcccagaagaatgagagtgcccggcagcagctcgagcggcagaacaaggagctccggagcaagctccacgagatggagggggccgtcaagtccaagttcaagtccaccatcgcggcgctggaggccaagattgcacagctggaggagcaggtcgagcaggaggccagagagaaacaggcggccaccaagtcgctgaagcagaaagacaagaagctgaaggaaatcttgctccaggtggaggacgagcgcaagatggccgagcagtacaaggagcaggcagagaaaggcaatgcctgatgatgaggactagtccctgttcccagagcccacttttttttctttttttgaaataaaatagcctgtctttcagatctaaaaaaaaaaaaaaaaaaaaaaaaaaaaaaaaaaaaaaaaaaaaaaaaaaaaaaaaaaaaaaaaaaaaaaaaaaaaaaaaaaaaaaaaaaaaaaaaaaaagaatt

SEQ ID NO: 1441 - RNA, 871 nt, synthetic construct
  misc_feature 1..871: note = Artificial____CBFbeta(1-165)_Linker_Lifeact mRNA wt mod
  source 1..871: mol_type = other RNA
aggagagtcccgcagtcggcgtccagcggctctgcttgttcgtgtgtgtgtcgttgcaggccttattcaagcttaccatgccgcgcgtcgtgcccgaccagagaagcaagtttgagaacgaggagttctttaggaagctgagccgcgagtgtgagattaagtacacgggctttagggaccggccccacgaggaacgccaggcacgcttccagaacgcctgccgcgacggccgctcggaaatcgcttttgtggccacaggaaccaatctgtctctccagttctttccggccagctggcagggagaacagcgacaaacacctagccgagagtatgtcgacttagaaagagaagcaggcaaggtatatttgaaggctcccatgattctgaatggagtctgtgttatctggaaaggctggattgatctccaaagactggatggtatgggctgtctggagtttgatgaggagcgagcccagcaggaggatgcattagcacaacaggcctttgaagaggctcggagaaggacacgcgaatttgaagatagagacaggtctcatcgggaggaaatggagggcgggagcggcgggtccggcgggagcggcggctccgggggcgggggcgtggccgacctgatcaagaagttcgagagcatctccaaggaggagggggacccgcccgtcgccacctgatgatgaggactagtccctgttcccagagcccacttttttttctttttttgaaataaaatagcctgtctttcagatctaaaaaaaaaaaaaaaaaaaaaaaaaaaaaaaaaaaaaaaaaaaaaaaaaaaaaaaaaaaaaaaaaaaaaaaaaaaaaaaaaaaaaaaaaaaaaaaaaaaagaatt

SEQ ID NO: 1442 - RNA, 838 nt, synthetic construct
  misc_feature 1..838: note = Artificial____CBFbeta(1-165)_HIF1alpha(549-575) mRNA wt mod
  source 1..838: mol_type = other RNA
aggagagtcccgcagtcggcgtccagcggctctgcttgttcgtgtgtgtgtcgttgcaggccttattcaagcttaccatgccgcgcgtcgtgcccgaccagagaagcaagtttgagaacgaggagttctttaggaagctgagccgcgagtgtgagattaagtacacgggctttagggaccggccccacgaggaacgccaggcacgcttccagaacgcctgccgcgacggccgctcggaaatcgcttttgtggccacaggaaccaatctgtctctccagttctttccggccagctggcagggagaacagcgacaaacacctagccgagagtatgtcgacttagaaagagaagcaggcaaggtatatttgaaggctcccatgattctgaatggagtctgtgttatctggaaaggctggattgatctccaaagactggatggtatgggctgtctggagtttgatgaggagcgagcccagcaggaggatgcattagcacaacaggcctttgaagaggctcggagaaggacacgcgaatttgaagatagagacaggtctcatcgggaggaaatggagccattttctactcaggacacagatttagacttggagatgttagctccctatatcccaatggatgatgacttccagttacgttgatgatgaggactagtccctgttcccagagcccacttttttttctttttttgaaataaaatagcctgtctttcagatctaaaaaaaaaaaaaaaaaaaaaaaaaaaaaaaaaaaaaaaaaaaaaaaaaaaaaaaaaaaaaaaaaaaaaaaaaaaaaaaaaaaaaaaaaaaaaaaaaaaagaatt

SEQ ID NO: 1443 - RNA, 883 nt, synthetic construct
  misc_feature 1..883: note Artificial____CBFbeta(1-165)_Linker_HIF1alpha(549-575) mRNA wt mod
  source 1..883: mol_type = other RNA
aggagagtcccgcagtcggcgtccagcggctctgcttgttcgtgtgtgtgtcgttgcaggccttattcaagcttaccatgccgcgcgtcgtgcccgaccagagaagcaagtttgagaacgaggagttctttaggaagctgagccgcgagtgtgagattaagtacacgggctttagggaccggccccacgaggaacgccaggcacgcttccagaacgcctgccgcgacggccgctcggaaatcgcttttgtggccacaggaaccaatctgtctctccagttctttccggccagctggcagggagaacagcgacaaacacctagccgagagtatgtcgacttagaaagagaagcaggcaaggtatatttgaaggctcccatgattctgaatggagtctgtgttatctggaaaggctggattgatctccaaagactggatggtatgggctgtctggagtttgatgaggagcgagcccagcaggaggatgcattagcacaacaggcctttgaagaggctcggagaaggacacgcgaatttgaagatagagacaggtctcatcgggaggaaatggagggcgggagcggcgggtccggcgggagcggcggctccgggggcgggccattttctactcaggacacagatttagacttggagatgttagctccctatatcccaatggatgatgacttccagttacgttgatgatgaggactagtccctgttcccagagcccacttttttttctttttttgaaataaaatagcctgtctttcagatctaaaaaaaaaaaaaaaaaaaaaaaaaaaaaaaaaaaaaaaaaaaaaaaaaaaaaaaaaaaaaaaaaaaaaaaaaaaaaaaaaaaaaaaaaaaaaaaaaaaagaatt

SEQ ID NO: 1444 - RNA, 2518 nt, synthetic construct
  misc_feature 1..2518: note = Artificial____RUNX1(1-177)_N_RUNX1T1a(31-604) mRNA wt mod
  source 1..2518: mol_type = other RNA
aggagagtcccgcagtcggcgtccagcggctctgcttgttcgtgtgtgtgtcgttgcaggccttattcaagcttaccatgcgtatccccgtagatgccagcacgagccgccgcttcacgccgccttccaccgcgctgagcccaggcaagatgagcgaggcgttgccgctgggcgccccggacgccggcgctgccctggccggcaagctgaggagcggcgaccgcagcatggtggaggtgctggccgaccacccgggcgagctggtgcgcaccgacagccccaacttcctctgctccgtgctgcctacgcactggcgctgcaacaagaccctgcccatcgctttcaaggtggtggccctaggggatgttccagatggcactctggtcactgtgatggctggcaatgatgaaaactactcggctgagctgagaaatgctaccgcagccatgaagaaccaggttgcaagatttaatgacctcaggtttgtcggtcgaagtggaagagggaaaagtttcactctgaccatcactgtcttcacaaacccaccgcaagtcgccacctaccacagagccatcaaaatcacagtggatgggccccgagaacctcgaaaccgtactgagaagcactccacaatgccagactcacctgtggatgtgaagacgcaatctaggctgactcctccaacaatgccacctcccccaactactcaaggagctccaagaaccagttcatttacaccgacaacgttaactaatggcacgagccattctcctacagccttgaatggcgccccctcaccacccaatggcttcagcaatgggccttcctcttcttcctcctcctctctggctaatcaacagctgcccccagcctgtggtgccaggcaactcagcaagctgaaaaggttccttactaccctgcagcagtttggcaatgacatttcacccgagataggagaaagagttcgcaccctcgttctgggacttgtgaactccactttgacaattgaagaatttcattccaaactgcaagaagctactaacttcccactgagaccttttgtcatcccatttttgaaggccaacttgcccctgctgcagcgtgagctcctccactgcgcaagactggccaaacagaaccctgcccagtacctcgcccagcatgaacagctgcttctggatgccagcaccacctcacctgttgactcctcagagctgcttctcgatgtgaacgaaaacgggaagaggcgaactccagacagaaccaaagaaaatggctttgacagagagcctttgcactcagaacatccaagcaagcgaccatgcactattagcccaggccagcggtacagtccaaataacggcttatcctaccagcccaatggcctgcctcaccctaccccacctccacctcagcattaccgtttggatgatatggccattgcccaccactacagggactcctatcgacaccccagccacagggacctcagggacagaaacagacctatggggttgcatggcacacgtcaagaagaaatgattgatcacagactaacagacagagaatgggcagaagagtggaaacatcttgaccatctgttaaactgcataatggacatggtagaaaaaacaaggcgatctctcaccgtactaaggcggtgtcaagaagcagaccgggaagaattgaattactggatccggcggtacagtgacgccgaggacttaaaaaaaggtggcggcagtagcagcagccactctaggcagcagagtcccgtcaacccagacccagttgcactagacgcgcatcgggagttccttcacaggcctgcgtctggatacgtgccagaggagatctggaagaaagctgaggaggccgtcaatgaggtgaagcgccaggcgatgacggagctgcagaaggccgtgtctgaggcggagcggaaagcccacgacatgatcacaacagagagggccaagatggagcgcacggtcgccgaggccaaacggcaggcggcggaggacgcactggcagttatcaatcagcaggaggattcaagcgagagttgctggaattgtggccgtaaagcgagtgaaacctgcagtggctgtaacacagcccgatactgtggctcattttgccagcacaaagactgggagaagcaccatcacatctgtggacagaccctgcaggcccagcagcagggagacacacctgcagtcagctcctctgtcacgcccaacagcggggctgggagcccgatggacacaccaccagcagccactccgaggtcaaccaccccgggaaccccttccaccatagagacaacccctcgctgatgatgaggactagtccctgttcccagagcccacttttttttctttttttgaaataaaatagcctgtctttcagatctaaaaaaaaaaaaaaaaaaaaaaaaaaaaaaaaaaaaaaaaaaaaaaaaaaaaaaaaaaaaaaaaaaaaaaaaaaaaaaaaaaaaaaaaaaaaaaaaaaaagaatt

SEQ ID NO: 1445 - RNA, 1033 nt, synthetic construct
  misc_feature 1..1033: note = Artificial____RUNX1(1-241)_RUNX1T1b(short) mRNA wt mod
  source 1..1033: mol_type = other RNA
aggagagtcccgcagtcggcgtccagcggctctgcttgttcgtgtgtgtgtcgttgcaggccttattcaagcttaccatgcgtatccccgtagatgccagcacgagccgccgcttcacgccgccttccaccgcgctgagcccaggcaagatgagcgaggcgttgccgctgggcgccccggacgccggcgctgccctggccggcaagctgaggagcggcgaccgcagcatggtggaggtgctggccgaccacccgggcgagctggtgcgcaccgacagccccaacttcctctgctccgtgctgcctacgcactggcgctgcaacaagaccctgcccatcgctttcaaggtggtggccctaggggatgttccagatggcactctggtcactgtgatggctggcaatgatgaaaactactcggctgagctgagaaatgctaccgcagccatgaagaaccaggttgcaagatttaatgacctcaggtttgtcggtcgaagtggaagagggaaaagtttcactctgaccatcactgtcttcacaaacccaccgcaagtcgccacctaccacagagccatcaaaatcacagtggatgggccccgagaacctcgaagacatcggcagaaactagatgatcagaccaagcccgggagcttgtccttttccgagcggctcagtgaactggagcagctgcggcgcacagccatgagggtcagcccacaccacccagcccccacgcccaaccctcgtgcctccctgaaccactccactgcctttaaccctcagcctcagagtcagatgcaggaggtgggcttctgccacgtcgcccaggtggggctgaagctcctgggctgatgatgaggactagtccctgttcccagagcccacttttttttctttttttgaaataaaatagcctgtctttcagatctaaaaaaaaaaaaaaaaaaaaaaaaaaaaaaaaaaaaaaaaaaaaaaaaaaaaaaaaaaaaaaaaaaaaaaaaaaaaaaaaaaaaaaaaaaaaaaaaaaaagaatt

SEQ ID NO: 1446 - RNA, 2737 nt, synthetic construct
  misc_feature 1..2737: note = Artificial____RUNX1(1-241)_V_RUNX1T1b(22-604) mRNA wt mod
  source 1..2737: mol_type = other RNA
aggagagtcccgcagtcggcgtccagcggctctgcttgttcgtgtgtgtgtcgttgcaggccttattcaagcttaccatgcgtatccccgtagatgccagcacgagccgccgcttcacgccgccttccaccgcgctgagcccaggcaagatgagcgaggcgttgccgctgggcgccccggacgccggcgctgccctggccggcaagctgaggagcggcgaccgcagcatggtggaggtgctggccgaccacccgggcgagctggtgcgcaccgacagccccaacttcctctgctccgtgctgcctacgcactggcgctgcaacaagaccctgcccatcgctttcaaggtggtggccctaggggatgttccagatggcactctggtcactgtgatggctggcaatgatgaaaactactcggctgagctgagaaatgctaccgcagccatgaagaaccaggttgcaagatttaatgacctcaggtttgtcggtcgaagtggaagagggaaaagtttcactctgaccatcactgtcttcacaaacccaccgcaagtcgccacctaccacagagccatcaaaatcacagtggatgggccccgagaacctcgaagacatcggcagaaactagatgatcagaccaagcccgggagcttgtccttttccgagcggctcagtgaactggagcagctgcggcgcacagccatgagggtcagcccacaccacccagcccccacgcccaaccctcgtgcctccctgaaccactccactgcctttaaccctcagcctcagagtcagatgcaggtgggtcctgagaaaagggtgccagcgatgcctggatcgcctgtggaagtgaagatacagtccagatcctcacctcccaccatgccacccctcccaccaataaatcctggaggaccgaggccagtgtccttcactcctactgcattaagcaatggcatcaaccattctcctcctaccctgaatggtgccccatcaccgccacagagattcagcaatggtcctgcctcctccacatcatctgcactcacaaatcagcaattgccagccacttgtggtgctcgacaactcagcaagttgaaacgctttcttaccactctgcaacagtttggcaatgacatctcccctgagattggggagaaggtgcggactcttgttcttgcactggtgaactcaacagtgacaattgaggagttccactgtaagctccaagaagccacaaactttccccttcgtccttttgtgattccatttctcaaggccaacctgcccctgctgcagcgggaactgctgcactgcgctcgggcggccaagcagaccccatcccagtacctggctcagcacgaacaccttctgctcaacacaagcattgcatcgcctgctgactcgtcagagttgctcatggaggtgcacggaaatgggaagaggcccagtccagagaggagagaagagaatagttttgatagagacacaattgctcctgagcctcctgccaagagagtatgtaccatcagccctgctcctcggcacagtcctgctctcactgtgcccctcatgaatcccgggggccaattccatcctacccctccacctcttcagcattacaccttagaggatattgcaacttctcacctgtatcgggaacccaacaagatgctagagcatcgagaagttcgtgatagacaccacagtcttggtctaaatggaggctatcaagatgagttggtagatcatcgtttgacagaaagggaatgggctgatgaatggaaacatcttgaccatgcgctgaattgcattatggaaatggtagagaaaacaaggcgctctatggcagttctgcggcgctgtcaggaatcagatcgtgaagaactcaactactggaaaagacggtacaatgaaaacacagagctgaggaaaacggggaccgagttggtctccaggcagcacagccctgggagtgcagattctctcagcaatgattctcagagagagttcaacagcaggccaggtacaggatacgtacctgtggagttttggaagaaaacagaagaagctgtgaataaggtgaaaattcaggccatgtcagaagtacagaaggccgtcgctgaggcagagcagaaagcctttgaagtgattgcaacagagagagcacgaatggagcaaaccatagcggatgtcaagcggcaggccgcagaggatgctttcctcgtcatcaatgagcaagaggagtccacggagaactgctggaactgtggccgcaaagccagcgagacatgcagtggctgcaatatcgcgcgatactgtggctctttctgccagcacaaggactgggagcggcaccaccgcctctgtggtcagaacctgcatggccagagcccccacggccagggccggccgctgcttcctgtaggcaggggctcctctgccaggtccgccgactgcagcgtgcccagcccagccctcgacaagacctcggcaaccacatcgcgttcctcaacacctgcttctgtgacagctatcgacaccaacggactctgatgatgaggactagtccctgttcccagagcccacttttttttctttttttgaaataaaatagcctgtctttcagatctaaaaaaaaaaaaaaaaaaaaaaaaaaaaaaaaaaaaaaaaaaaaaaaaaaaaaaaaaaaaaaaaaaaaaaaaaaaaaaaaaaaaaaaaaaaaaaaaaaaagaatt

SEQ ID NO: 1447 - RNA, 2737 nt, synthetic construct
  misc_feature 1..2737: note = Artificial____RUNX1(1-241)_I_RUNX1T1b(22-604) mRNA wt mod
  source 1..2737: mol_type = other RNA
aggagagtcccgcagtcggcgtccagcggctctgcttgttcgtgtgtgtgtcgttgcaggccttattcaagcttaccatgcgtatccccgtagatgccagcacgagccgccgcttcacgccgccttccaccgcgctgagcccaggcaagatgagcgaggcgttgccgctgggcgccccggacgccggcgctgccctggccggcaagctgaggagcggcgaccgcagcatggtggaggtgctggccgaccacccgggcgagctggtgcgcaccgacagccccaacttcctctgctccgtgctgcctacgcactggcgctgcaacaagaccctgcccatcgctttcaaggtggtggccctaggggatgttccagatggcactctggtcactgtgatggctggcaatgatgaaaactactcggctgagctgagaaatgctaccgcagccatgaagaaccaggttgcaagatttaatgacctcaggtttgtcggtcgaagtggaagagggaaaagtttcactctgaccatcactgtcttcacaaacccaccgcaagtcgccacctaccacagagccatcaaaatcacagtggatgggccccgagaacctcgaagacatcggcagaaactagatgatcagaccaagcccgggagcttgtccttttccgagcggctcagtgaactggagcagctgcggcgcacagccatgagggtcagcccacaccacccagcccccacgcccaaccctcgtgcctccctgaaccactccactgcctttaaccctcagcctcagagtcagatgcagatcggtcctgagaaaagggtgccagcgatgcctggatcgcctgtggaagtgaagatacagtccagatcctcacctcccaccatgccacccctcccaccaataaatcctggaggaccgaggccagtgtccttcactcctactgcattaagcaatggcatcaaccattctcctcctaccctgaatggtgccccatcaccgccacagagattcagcaatggtcctgcctcctccacatcatctgcactcacaaatcagcaattgccagccacttgtggtgctcgacaactcagcaagttgaaacgctttcttaccactctgcaacagtttggcaatgacatctcccctgagattggggagaaggtgcggactcttgttcttgcactggtgaactcaacagtgacaattgaggagttccactgtaagctccaagaagccacaaactttccccttcgtccttttgtgattccatttctcaaggccaacctgcccctgctgcagcgggaactgctgcactgcgctcgggcggccaagcagaccccatcccagtacctggctcagcacgaacaccttctgctcaacacaagcattgcatcgcctgctgactcgtcagagttgctcatggaggtgcacggaaatgggaagaggcccagtccagagaggagagaagagaatagttttgatagagacacaattgctcctgagcctcctgccaagagagtatgtaccatcagccctgctcctcggcacagtcctgctctcactgtgcccctcatgaatcccgggggccaattccatcctacccctccacctcttcagcattacaccttagaggatattgcaacttctcacctgtatcgggaacccaacaagatgctagagcatcgagaagttcgtgatagacaccacagtcttggtctaaatggaggctatcaagatgagttggtagatcatcgtttgacagaaagggaatgggctgatgaatggaaacatcttgaccatgcgctgaattgcattatggaaatggtagagaaaacaaggcgctctatggcagttctgcggcgctgtcaggaatcagatcgtgaagaactcaactactggaaaagacggtacaatgaaaacacagagctgaggaaaacggggaccgagttggtctccaggcagcacagccctgggagtgcagattctctcagcaatgattctcagagagagttcaacagcaggccaggtacaggatacgtacctgtggagttttggaagaaaacagaagaagctgtgaataaggtgaaaattcaggccatgtcagaagtacagaaggccgtcgctgaggcagagcagaaagcctttgaagtgattgcaacagagagagcacgaatggagcaaaccatagcggatgtcaagcggcaggccgcagaggatgctttcctcgtcatcaatgagcaagaggagtccacggagaactgctggaactgtggccgcaaagccagcgagacatgcagtggctgcaatatcgcgcgatactgtggctctttctgccagcacaaggactgggagcggcaccaccgcctctgtggtcagaacctgcatggccagagcccccacggccagggccggccgctgcttcctgtaggcaggggctcctctgccaggtccgccgactgcagcgtgcccagcccagccctcgacaagacctcggcaaccacatcgcgttcctcaacacctgcttctgtgacagctatcgacaccaacggactctgatgatgaggactagtccctgttcccagagcccacttttttttctttttttgaaataaaatagcctgtctttcagatctaaaaaaaaaaaaaaaaaaaaaaaaaaaaaaaaaaaaaaaaaaaaaaaaaaaaaaaaaaaaaaaaaaaaaaaaaaaaaaaaaaaaaaaaaaaaaaaaaaaagaatt

SEQ ID NO: 1448 - RNA, 1621 nt, synthetic construct
  misc_feature 1..1621: note = Homo sapiens__Q01196-1__RUNX1(K83E_R174Q) mRNA opt1
  source 1..1621: mol_type = other RNA
aggagagtcccgcagtcggcgtccagcggctctgcttgttcgtgtgtgtgtcgttgcaggccttattcaagcttaccatgcgcatccccgtggacgccagcacctcccggcgcttcaccccgcccagcacggccctgtcccccggcaagatgagcgaggcgctccccctgggggccccggacgccggcgccgccctggcggggaagctccggtccggcgaccgcagcatggtcgaggtgctggccgaccaccccggggagctggtgcggaccgactcccccaacttcctctgcagcgtcctgcccacccactggcgctgcaacgagaccctgccgatcgccttcaaggtggtggccctcggcgacgtccccgacggcacgctggtgaccgtgatggcggggaacgacgagaactactccgccgagctgcggaacgccaccgccgccatgaagaaccaggtcgcgcgcttcaacgacctccggttcgtgggccgcagcgggcggggcaagtccttcaccctgacgatcaccgtgttcaccaacccgccccaggtcgccacctaccaccgcgccatcaagatcacggtggacgggccccaggagccccgccggcaccgccagaagctggacgaccagaccaagcccggcagcctctccttcagcgagcggctgtccgagctggagcagctccgccggaccgccatgcgcgtgagcccccaccacccggcccccacccccaacccccgggcgtccctgaaccacagcacggccttcaacccgcagccccagtcccagatgcaggacacccgccagatccagcccagcccgccctggagctacgaccagtcctaccagtacctgggcagcatcgcctcccccagcgtccaccccgccacccccatctccccggggcgcgccagcggcatgaccacgctctccgcggagctgagctcccggctgagcaccgcccccgacctcaccgccttctccgacccccgccagttcccggccctgcccagcatctccgacccccggatgcactaccccggggccttcacctacagcccgacgcccgtgacctccggcatcggcatcgggatgagcgcgatgggctccgccacccgctaccacacctacctgcccccgccctaccccgggagctcccaggcccagggcgggcccttccaggccagcagcccctcctaccacctctactacggcgcgagcgccggctcctaccagttcagcatggtcgggggcgagcggtccccgccccgcatcctgccgccctgcacgaacgccagcaccgggtccgccctgctcaaccccagcctgcccaaccagtccgacgtggtggaggccgagggcagccactccaacagccccaccaacatggcgccctccgcccggctggaggaggccgtgtggcgcccgtactgatgatgaggactagtccctgttcccagagcccacttttttttctttttttgaaataaaatagcctgtctttcagatctaaaaaaaaaaaaaaaaaaaaaaaaaaaaaaaaaaaaaaaaaaaaaaaaaaaaaaaaaaaaaaaaaaaaaaaaaaaaaaaaaaaaaaaaaaaaaaaaaaaagaatt

SEQ ID NO: 1449 - RNA, 2095 nt, synthetic construct
  misc_feature 1..2095: note = Homo sapiens____CBFbeta(1-165)_SMMHC(1527-1972) mRNA opt1
  source 1..2095: mol_type = other RNA
aggagagtcccgcagtcggcgtccagcggctctgcttgttcgtgtgtgtgtcgttgcaggccttattcaagcttaccatgccccgcgtggtcccggaccagcggagcaagttcgagaacgaggagttcttccgcaagctgtcccgggagtgcgagatcaagtacaccggcttccgcgaccggccccacgaggagcgccaggcccggttccagaacgcctgccgcgacgggcggagcgagatcgcgttcgtggccaccggcacgaacctctccctgcagttcttccccgccagctggcagggggagcagcgccagaccccctcccgggagtacgtggacctggagcgcgaggccggcaaggtctacctcaaggccccgatgatcctgaacggggtgtgcgtgatctggaagggctggatcgacctgcagcggctcgacggcatggggtgcctggagttcgacgaggagcgcgcgcagcaggaggacgccctggcccagcaggccttcgaggaggcgcggcgccggacccgcgagttcgaggaccgggaccgcagccaccgggaggagatggaggtgcacgagctggagaagtccaagcgcgccctcgagacccagatggaggagatgaagacccagctggaggagctggaggacgagctccaggccacggaggacgcgaagctgcggctggaggtcaacatgcaggccctcaagggccagttcgagcgcgacctgcaggcccgggacgagcagaacgaggagaagcgccggcagctgcagcgccagctccacgagtacgagaccgagctggaggacgagcggaagcagcgcgccctggccgcggccgccaagaagaagctcgagggggacctgaaggacctggagctccaggccgacagcgcgatcaagggccgggaggaggccatcaagcagctgcgcaagctgcaggcccagatgaaggacttccagcgggagctcgaggacgcccgcgccagccgggacgagatcttcgcgaccgccaaggagaacgagaagaaggccaagtccctggaggccgacctgatgcagctccaggaggacctggccgcggccgagcgcgcccggaagcaggccgacctggagaaggaggagctcgccgaggagctggcgagctccctgagcgggcgcaacgccctccaggacgagaagcggcgcctggaggcccggatcgcccagctggaggaggagctcgaggaggagcagggcaacatggaggccatgtccgaccgcgtgcggaaggcgacccagcaggccgagcagctgagcaacgagctggccacggagcgctccaccgcccagaagaacgagagcgcgcgccagcagctcgagcggcagaacaaggagctgcgctccaagctgcacgagatggagggggccgtgaagtccaagttcaagagcaccatcgccgccctcgaggccaagatcgcgcagctggaggagcaggtcgagcaggaggcccgggagaagcaggccgccaccaagagcctgaagcagaaggacaagaagctcaaggagatcctgctccaggtggaggacgagcgcaagatggccgagcagtacaaggagcaggcggagaagggcaacgcccgggtgaagcagctgaagcgccagctggaggaggccgaggaggagtcccagcggatcaacgccaaccgccggaagctgcagcgcgagctcgacgaggccacggagagcaacgaggcgatgggccgggaggtcaacgccctgaagtccaagctgcgccgggggaacgagaccagcttcgtgccctcccgccggagcggcgggcgccgggtgatcgagaacgccgacggcagcgaggaggagaccgacacccgcgacgccgacttcaacgggacgaaggcgtccgagtgatgatgaggactagtccctgttcccagagcccacttttttttctttttttgaaataaaatagcctgtctttcagatctaaaaaaaaaaaaaaaaaaaaaaaaaaaaaaaaaaaaaaaaaaaaaaaaaaaaaaaaaaaaaaaaaaaaaaaaaaaaaaaaaaaaaaaaaaaaaaaaaaaagaatt

SEQ ID NO: 1450 - RNA, 1810 nt, synthetic construct
  misc_feature 1..1810: note = Artificial____CBFbeta(1-165)_SMMHC(1527-1877) mRNA opt1
  source 1..1810: mol_type = other RNA
aggagagtcccgcagtcggcgtccagcggctctgcttgttcgtgtgtgtgtcgttgcaggccttattcaagcttaccatgccccgcgtggtcccggaccagcggagcaagttcgagaacgaggagttcttccgcaagctgtcccgggagtgcgagatcaagtacaccggcttccgcgaccggccccacgaggagcgccaggcccggttccagaacgcctgccgcgacgggcggagcgagatcgcgttcgtggccaccggcacgaacctctccctgcagttcttccccgccagctggcagggggagcagcgccagaccccctcccgggagtacgtggacctggagcgcgaggccggcaaggtctacctcaaggccccgatgatcctgaacggggtgtgcgtgatctggaagggctggatcgacctgcagcggctcgacggcatggggtgcctggagttcgacgaggagcgcgcgcagcaggaggacgccctggcccagcaggccttcgaggaggcgcggcgccggacccgcgagttcgaggaccgggaccgcagccaccgggaggagatggaggtgcacgagctggagaagtccaagcgcgccctcgagacccagatggaggagatgaagacccagctggaggagctggaggacgagctccaggccacggaggacgcgaagctgcggctggaggtcaacatgcaggccctcaagggccagttcgagcgcgacctgcaggcccgggacgagcagaacgaggagaagcgccggcagctgcagcgccagctccacgagtacgagaccgagctggaggacgagcggaagcagcgcgccctggccgcggccgccaagaagaagctcgagggggacctgaaggacctggagctccaggccgacagcgcgatcaagggccgggaggaggccatcaagcagctgcgcaagctgcaggcccagatgaaggacttccagcgggagctcgaggacgcccgcgccagccgggacgagatcttcgcgaccgccaaggagaacgagaagaaggccaagtccctggaggccgacctgatgcagctccaggaggacctggccgcggccgagcgcgcccggaagcaggccgacctggagaaggaggagctcgccgaggagctggcgagctccctgagcgggcgcaacgccctccaggacgagaagcggcgcctggaggcccggatcgcccagctggaggaggagctcgaggaggagcagggcaacatggaggccatgtccgaccgcgtgcggaaggcgacccagcaggccgagcagctgagcaacgagctggccacggagcgctccaccgcccagaagaacgagagcgcgcgccagcagctcgagcggcagaacaaggagctgcgctccaagctgcacgagatggagggggccgtgaagtccaagttcaagagcaccatcgccgccctcgaggccaagatcgcgcagctggaggagcaggtcgagcaggaggcccgggagaagcaggccgccaccaagagcctgaagcagaaggacaagaagctcaaggagatcctgctccaggtggaggacgagcgcaagatggccgagcagtacaaggagcaggcggagaagggcaacgcctgatgatgaggactagtccctgttcccagagcccacttttttttctttttttgaaataaaatagcctgtctttcagatctaaaaaaaaaaaaaaaaaaaaaaaaaaaaaaaaaaaaaaaaaaaaaaaaaaaaaaaaaaaaaaaaaaaaaaaaaaaaaaaaaaaaaaaaaaaaaaaaaaaagaatt

SEQ ID NO: 1451 - RNA, 871 nt, synthetic construct
  misc_feature 1..871: note = Artificial____CBFbeta(1-165)_Linker_Lifeact mRNA opt1
  source 1..871: mol_type = other RNA
aggagagtcccgcagtcggcgtccagcggctctgcttgttcgtgtgtgtgtcgttgcaggccttattcaagcttaccatgccccgcgtggtcccggaccagcggagcaagttcgagaacgaggagttcttccgcaagctgtcccgggagtgcgagatcaagtacaccggcttccgcgaccggccccacgaggagcgccaggcccggttccagaacgcctgccgcgacgggcggagcgagatcgcgttcgtggccaccggcacgaacctctccctgcagttcttccccgccagctggcagggggagcagcgccagaccccctcccgggagtacgtggacctggagcgcgaggccggcaaggtctacctcaaggccccgatgatcctgaacggggtgtgcgtgatctggaagggctggatcgacctgcagcggctcgacggcatggggtgcctggagttcgacgaggagcgcgcgcagcaggaggacgccctggcccagcaggccttcgaggaggcgcggcgccggacccgcgagttcgaggaccgggaccgcagccaccgggaggagatggagggcgggagcggcgggtccggcgggagcggcggctccgggggcgggggcgtggccgacctgatcaagaagttcgagagcatctccaaggaggagggggacccgcccgtcgccacctgatgatgaggactagtccctgttcccagagcccacttttttttctttttttgaaataaaatagcctgtctttcagatctaaaaaaaaaaaaaaaaaaaaaaaaaaaaaaaaaaaaaaaaaaaaaaaaaaaaaaaaaaaaaaaaaaaaaaaaaaaaaaaaaaaaaaaaaaaaaaaaaaaagaatt

SEQ ID NO: 1452 - RNA, 838 nt, synthetic construct
  misc_feature 1..838: note = Artificial____CBFbeta(1-165)_HIF1alpha(549-575) mRNA opt1
  source 1..838: mol_type = other RNA
aggagagtcccgcagtcggcgtccagcggctctgcttgttcgtgtgtgtgtcgttgcaggccttattcaagcttaccatgccccgcgtggtcccggaccagcggagcaagttcgagaacgaggagttcttccgcaagctgtcccgggagtgcgagatcaagtacaccggcttccgcgaccggccccacgaggagcgccaggcccggttccagaacgcctgccgcgacgggcggagcgagatcgcgttcgtggccaccggcacgaacctctccctgcagttcttccccgccagctggcagggggagcagcgccagaccccctcccgggagtacgtggacctggagcgcgaggccggcaaggtctacctcaaggccccgatgatcctgaacggggtgtgcgtgatctggaagggctggatcgacctgcagcggctcgacggcatggggtgcctggagttcgacgaggagcgcgcgcagcaggaggacgccctggcccagcaggccttcgaggaggcgcggcgccggacccgcgagttcgaggaccgggaccgcagccaccgggaggagatggagcccttcagcacccaggacaccgacctggacctcgagatgctggccccgtacatccccatggacgacgacttccagctgcgctgatgatgaggactagtccctgttcccagagcccacttttttttctttttttgaaataaaatagcctgtctttcagatctaaaaaaaaaaaaaaaaaaaaaaaaaaaaaaaaaaaaaaaaaaaaaaaaaaaaaaaaaaaaaaaaaaaaaaaaaaaaaaaaaaaaaaaaaaaaaaaaaaaagaatt

SEQ ID NO: 1453 - RNA, 883 nt, synthetic construct
  misc_feature 1..883: note Artificial____CBFbeta(1-165)_Linker_HIF1alpha(549-575) mRNA opt1
  source 1..883: mol_type = other RNA
aggagagtcccgcagtcggcgtccagcggctctgcttgttcgtgtgtgtgtcgttgcaggccttattcaagcttaccatgccccgcgtggtcccggaccagcggagcaagttcgagaacgaggagttcttccgcaagctgtcccgggagtgcgagatcaagtacaccggcttccgcgaccggccccacgaggagcgccaggcccggttccagaacgcctgccgcgacgggcggagcgagatcgcgttcgtggccaccggcacgaacctctccctgcagttcttccccgccagctggcagggggagcagcgccagaccccctcccgggagtacgtggacctggagcgcgaggccggcaaggtctacctcaaggccccgatgatcctgaacggggtgtgcgtgatctggaagggctggatcgacctgcagcggctcgacggcatggggtgcctggagttcgacgaggagcgcgcgcagcaggaggacgccctggcccagcaggccttcgaggaggcgcggcgccggacccgcgagttcgaggaccgggaccgcagccaccgggaggagatggagggcgggagcggcgggtccggcgggagcggcggctccgggggcgggcccttcagcacccaggacaccgacctggacctcgagatgctggccccgtacatccccatggacgacgacttccagctgcgctgatgatgaggactagtccctgttcccagagcccacttttttttctttttttgaaataaaatagcctgtctttcagatctaaaaaaaaaaaaaaaaaaaaaaaaaaaaaaaaaaaaaaaaaaaaaaaaaaaaaaaaaaaaaaaaaaaaaaaaaaaaaaaaaaaaaaaaaaaaaaaaaaaagaatt

SEQ ID NO: 1454 - RNA, 2518 nt, synthetic construct
  misc_feature 1..2518: note = Artificial____RUNX1(1-177)_N_RUNX1T1a(31-604) mRNA opt1
  source 1..2518: mol_type = other RNA
aggagagtcccgcagtcggcgtccagcggctctgcttgttcgtgtgtgtgtcgttgcaggccttattcaagcttaccatgcgcatccccgtggacgccagcacctcccggcgcttcaccccgcccagcacggccctgtcccccggcaagatgagcgaggcgctccccctgggggccccggacgccggcgccgccctggcggggaagctccggtccggcgaccgcagcatggtcgaggtgctggccgaccaccccggggagctggtgcggaccgactcccccaacttcctctgcagcgtcctgcccacccactggcgctgcaacaagaccctgccgatcgccttcaaggtggtggccctcggcgacgtccccgacggcacgctggtgaccgtgatggcggggaacgacgagaactactccgccgagctgcggaacgccaccgccgccatgaagaaccaggtcgcgcgcttcaacgacctccggttcgtgggccgcagcgggcggggcaagtccttcaccctgacgatcaccgtgttcaccaacccgccccaggtcgccacctaccaccgcgccatcaagatcacggtggacgggccccgggagccccgcaaccggaccgagaagcacagcacgatgcccgactccccggtggacgtgaagacccagagccgcctgaccccgcccaccatgcccccgccgcccacgacccagggcgcgccccggacctccagcttcacccccacgaccctgaccaacgggacctcccacagccccacggccctcaacggcgccccctccccgcccaacgggttcagcaacggcccctccagctccagctccagctccctggccaaccagcagctgccgcccgcctgcggcgcccgccagctcagcaagctgaagcggttcctgaccaccctccagcagttcgggaacgacatctcccccgagatcggcgagcgcgtccggaccctggtgctggggctcgtgaacagcacgctgaccatcgaggagttccacagcaagctgcaggaggcgaccaacttccccctccgccccttcgtcatccccttcctgaaggccaacctgcccctcctgcagcgggagctgctccactgcgcccgcctggccaagcagaaccccgcgcagtacctggcccagcacgagcagctcctgctggacgcctccaccacgagccccgtggactccagcgagctcctgctggacgtgaacgagaacggcaagcggcgcacccccgaccggaccaaggagaacgggttcgaccgcgagccgctccactccgagcaccccagcaagcggccctgcaccatctcccccggccagcgctacagcccgaacaacggcctgtcctaccagcccaacgggctgccccacccgacgcccccgccgccccagcactaccggctcgacgacatggccatcgcccaccactaccgcgacagctaccggcacccctcccaccgcgacctgcgcgaccggaaccgccccatgggcctgcacgggacccggcaggaggagatgatcgaccaccgcctcaccgaccgggagtgggcggaggagtggaagcacctggaccacctcctgaactgcatcatggacatggtcgagaagacccgccggagcctgacggtgctgcgccggtgccaggaggccgaccgcgaggagctcaactactggatccggcgctactccgacgccgaggacctgaagaagggcggcgggagctccagctcccacagccggcagcagtcccccgtgaaccccgaccccgtcgccctggacgcccaccgcgagttcctccaccggcccgcgagcggctacgtgcccgaggagatctggaagaaggccgaggaggccgtgaacgaggtcaagcgccaggccatgaccgagctgcagaaggccgtgagcgaggcggagcggaaggcccacgacatgatcaccaccgagcgcgccaagatggagcggacggtggccgaggccaagcgccaggcggccgaggacgccctggccgtcatcaaccagcaggaggactccagcgagtcctgctggaactgcgggcgcaaggcgagcgagacctgctccggctgcaacaccgcccggtactgcgggagcttctgccagcacaaggactgggagaagcaccaccacatctgcggccagaccctgcaggcccagcagcagggcgacacgccggccgtgtccagctccgtgacccccaacagcggggccggctcccccatggacacgcccccggcggccacgccccgcagcaccacccccgggaccccctccaccatcgagaccaccccgcggtgatgatgaggactagtccctgttcccagagcccacttttttttctttttttgaaataaaatagcctgtctttcagatctaaaaaaaaaaaaaaaaaaaaaaaaaaaaaaaaaaaaaaaaaaaaaaaaaaaaaaaaaaaaaaaaaaaaaaaaaaaaaaaaaaaaaaaaaaaaaaaaaaaagaatt

SEQ ID NO: 1455 - RNA, 1033 nt, synthetic construct
  misc_feature 1..1033: note = Artificial____RUNX1(1-241)_RUNX1T1b(short) mRNA opt1
  source 1..1033: mol_type = other RNA
aggagagtcccgcagtcggcgtccagcggctctgcttgttcgtgtgtgtgtcgttgcaggccttattcaagcttaccatgcgcatccccgtggacgccagcacctcccggcgcttcaccccgcccagcacggccctgtcccccggcaagatgagcgaggcgctccccctgggggccccggacgccggcgccgccctggcggggaagctccggtccggcgaccgcagcatggtcgaggtgctggccgaccaccccggggagctggtgcggaccgactcccccaacttcctctgcagcgtcctgcccacccactggcgctgcaacaagaccctgccgatcgccttcaaggtggtggccctcggcgacgtccccgacggcacgctggtgaccgtgatggcggggaacgacgagaactactccgccgagctgcggaacgccaccgccgccatgaagaaccaggtcgcgcgcttcaacgacctccggttcgtgggccgcagcgggcggggcaagtccttcaccctgacgatcaccgtgttcaccaacccgccccaggtcgccacctaccaccgcgccatcaagatcacggtggacgggccccgggagccccgccggcaccgccagaagctggacgaccagaccaagcccggcagcctctccttcagcgagcggctgtccgagctggagcagctccgccggaccgccatgcgcgtgagcccccaccacccggcccccacccccaacccccgggcgtccctgaaccacagcacggccttcaacccgcagccccagtcccagatgcaggaggtgggcttctgccacgtcgcccaggtggggctgaagctcctgggctgatgatgaggactagtccctgttcccagagcccacttttttttctttttttgaaataaaatagcctgtctttcagatctaaaaaaaaaaaaaaaaaaaaaaaaaaaaaaaaaaaaaaaaaaaaaaaaaaaaaaaaaaaaaaaaaaaaaaaaaaaaaaaaaaaaaaaaaaaaaaaaaaaagaatt

SEQ ID NO: 1456 - RNA, 2737 nt, synthetic construct
  misc_feature 1..2737: note = Artificial____RUNX1(1-241)_V_RUNX1T1b(22-604) mRNA opt1
  source 1..2737: mol_type = other RNA
aggagagtcccgcagtcggcgtccagcggctctgcttgttcgtgtgtgtgtcgttgcaggccttattcaagcttaccatgcgcatccccgtggacgccagcacctcccggcgcttcaccccgcccagcacggccctgtcccccggcaagatgagcgaggcgctccccctgggggccccggacgccggcgccgccctggcggggaagctccggtccggcgaccgcagcatggtcgaggtgctggccgaccaccccggggagctggtgcggaccgactcccccaacttcctctgcagcgtcctgcccacccactggcgctgcaacaagaccctgccgatcgccttcaaggtggtggccctcggcgacgtccccgacggcacgctggtgaccgtgatggcggggaacgacgagaactactccgccgagctgcggaacgccaccgccgccatgaagaaccaggtcgcgcgcttcaacgacctccggttcgtgggccgcagcgggcggggcaagtccttcaccctgacgatcaccgtgttcaccaacccgccccaggtcgccacctaccaccgcgccatcaagatcacggtggacgggccccgggagccccgccggcaccgccagaagctggacgaccagaccaagcccggcagcctctccttcagcgagcggctgtccgagctggagcagctccgccggaccgccatgcgcgtgagcccccaccacccggcccccacccccaacccccgggcgtccctgaaccacagcacggccttcaacccgcagccccagtcccagatgcaggtggggcccgagaagcgggtgccggcgatgcccggcagccccgtggaggtcaagatccagtcccgcagctccccgcccaccatgccgcccctgccgcccatcaaccccgggggcccccggcccgtgagcttcacccccacggccctgtccaacgggatcaaccactccccgcccaccctcaacggcgcccccagcccgccccagcgcttcagcaacggccccgcctccagcacctccagcgccctgaccaaccagcagctgcccgcgacgtgcggggcccggcagctctccaagctgaagcgcttcctgaccaccctccagcagttcggcaacgacatcagccccgagatcggggagaaggtgcggaccctggtcctggccctcgtgaactccacggtgaccatcgaggagttccactgcaagctgcaggaggccaccaacttccccctgcgccccttcgtcatccccttcctcaaggcgaacctgccgctgctccagcgggagctgctgcactgcgcccgcgccgccaagcagacccccagccagtacctcgcccagcacgagcacctcctgctgaacacgtccatcgcgagccccgccgacagctccgagctgctgatggaggtgcacggcaacgggaagcggcccagcccggagcgccgggaggagaactccttcgaccgcgacaccatcgcccccgagcccccggccaagcgggtgtgcaccatcagccccgcgccccgccactcccccgccctcaccgtcccgctgatgaaccccggcggccagttccaccccacgcccccgcccctgcagcactacaccctcgaggacatcgccaccagccacctgtaccgggagcccaacaagatgctggagcaccgcgaggtgcgggaccgccaccactccctcgggctgaacggcgggtaccaggacgagctggtggaccaccggctcaccgagcgcgagtgggccgacgagtggaagcacctggaccacgccctgaactgcatcatggagatggtcgagaagacgcgccggagcatggccgtgctccgccggtgccaggagtccgaccgcgaggagctgaactactggaagcggcgctacaacgagaacaccgagctgcggaagaccggcaccgagctcgtgagccgccagcactcccccggcagcgcggactccctgagcaacgactcccagcgggagttcaacagccgcccggggacgggctacgtccccgtggagttctggaagaagaccgaggaggccgtgaacaaggtcaagatccaggccatgtccgaggtgcagaaggccgtggccgaggcggagcagaaggccttcgaggtcatcgccaccgagcgggcccgcatggagcagaccatcgcggacgtgaagcggcaggccgccgaggacgccttcctggtcatcaacgagcaggaggagagcacggagaactgctggaactgcgggcgcaaggcctccgagacctgcagcggctgcaacatcgcgcggtactgcgggagcttctgccagcacaaggactgggagcgccaccaccggctctgcggccagaacctgcacggccagtccccgcacgggcagggccgccccctgctgcccgtggggcggggcagctccgcccgcagcgccgactgctccgtgcccagccccgccctcgacaagacctccgccaccacgagccgctccagcacccccgcgtccgtcaccgccatcgacaccaacgggctgtgatgatgaggactagtccctgttcccagagcccacttttttttctttttttgaaataaaatagcctgtctttcagatctaaaaaaaaaaaaaaaaaaaaaaaaaaaaaaaaaaaaaaaaaaaaaaaaaaaaaaaaaaaaaaaaaaaaaaaaaaaaaaaaaaaaaaaaaaaaaaaaaaaagaatt

SEQ ID NO: 1457 - RNA, 2737 nt, synthetic construct
  misc_feature 1..2737: note = Artificial____RUNX1(1-241)_I_RUNX1T1b(22-604) mRNA opt1
  source 1..2737: mol_type = other RNA
aggagagtcccgcagtcggcgtccagcggctctgcttgttcgtgtgtgtgtcgttgcaggccttattcaagcttaccatgcgcatccccgtggacgccagcacctcccggcgcttcaccccgcccagcacggccctgtcccccggcaagatgagcgaggcgctccccctgggggccccggacgccggcgccgccctggcggggaagctccggtccggcgaccgcagcatggtcgaggtgctggccgaccaccccggggagctggtgcggaccgactcccccaacttcctctgcagcgtcctgcccacccactggcgctgcaacaagaccctgccgatcgccttcaaggtggtggccctcggcgacgtccccgacggcacgctggtgaccgtgatggcggggaacgacgagaactactccgccgagctgcggaacgccaccgccgccatgaagaaccaggtcgcgcgcttcaacgacctccggttcgtgggccgcagcgggcggggcaagtccttcaccctgacgatcaccgtgttcaccaacccgccccaggtcgccacctaccaccgcgccatcaagatcacggtggacgggccccgggagccccgccggcaccgccagaagctggacgaccagaccaagcccggcagcctctccttcagcgagcggctgtccgagctggagcagctccgccggaccgccatgcgcgtgagcccccaccacccggcccccacccccaacccccgggcgtccctgaaccacagcacggccttcaacccgcagccccagtcccagatgcagatcgggcccgagaagcgggtgccggcgatgcccggcagccccgtggaggtcaagatccagtcccgcagctccccgcccaccatgccgcccctgccgcccatcaaccccgggggcccccggcccgtgagcttcacccccacggccctgtccaacgggatcaaccactccccgcccaccctcaacggcgcccccagcccgccccagcgcttcagcaacggccccgcctccagcacctccagcgccctgaccaaccagcagctgcccgcgacgtgcggggcccggcagctctccaagctgaagcgcttcctgaccaccctccagcagttcggcaacgacatcagccccgagatcggggagaaggtgcggaccctggtcctggccctcgtgaactccacggtgaccatcgaggagttccactgcaagctgcaggaggccaccaacttccccctgcgccccttcgtcatccccttcctcaaggcgaacctgccgctgctccagcgggagctgctgcactgcgcccgcgccgccaagcagacccccagccagtacctcgcccagcacgagcacctcctgctgaacacgtccatcgcgagccccgccgacagctccgagctgctgatggaggtgcacggcaacgggaagcggcccagcccggagcgccgggaggagaactccttcgaccgcgacaccatcgcccccgagcccccggccaagcgggtgtgcaccatcagccccgcgccccgccactcccccgccctcaccgtcccgctgatgaaccccggcggccagttccaccccacgcccccgcccctgcagcactacaccctcgaggacatcgccaccagccacctgtaccgggagcccaacaagatgctggagcaccgcgaggtgcgggaccgccaccactccctcgggctgaacggcgggtaccaggacgagctggtggaccaccggctcaccgagcgcgagtgggccgacgagtggaagcacctggaccacgccctgaactgcatcatggagatggtcgagaagacgcgccggagcatggccgtgctccgccggtgccaggagtccgaccgcgaggagctgaactactggaagcggcgctacaacgagaacaccgagctgcggaagaccggcaccgagctcgtgagccgccagcactcccccggcagcgcggactccctgagcaacgactcccagcgggagttcaacagccgcccggggacgggctacgtccccgtggagttctggaagaagaccgaggaggccgtgaacaaggtcaagatccaggccatgtccgaggtgcagaaggccgtggccgaggcggagcagaaggccttcgaggtcatcgccaccgagcgggcccgcatggagcagaccatcgcggacgtgaagcggcaggccgccgaggacgccttcctggtcatcaacgagcaggaggagagcacggagaactgctggaactgcgggcgcaaggcctccgagacctgcagcggctgcaacatcgcgcggtactgcgggagcttctgccagcacaaggactgggagcgccaccaccggctctgcggccagaacctgcacggccagtccccgcacgggcagggccgccccctgctgcccgtggggcggggcagctccgcccgcagcgccgactgctccgtgcccagccccgccctcgacaagacctccgccaccacgagccgctccagcacccccgcgtccgtcaccgccatcgacaccaacgggctgtgatgatgaggactagtccctgttcccagagcccacttttttttctttttttgaaataaaatagcctgtctttcagatctaaaaaaaaaaaaaaaaaaaaaaaaaaaaaaaaaaaaaaaaaaaaaaaaaaaaaaaaaaaaaaaaaaaaaaaaaaaaaaaaaaaaaaaaaaaaaaaaaaaagaatt

SEQ ID NO: 1458 - RNA, 1621 nt, synthetic construct
  misc_feature 1..1621: note = Homo sapiens__Q01196-1__RUNX1(K83E_R174Q) mRNA opt1
  source 1..1621: mol_type = other RNA
aggagagtcccgcagtcggcgtccagcggctctgcttgttcgtgtgtgtgtcgttgcaggccttattcaagcttaccatgcgcatccccgtggacgccagcacctcccggcgcttcaccccgcccagcacggccctgtcccccggcaagatgagcgaggcgctccccctgggggccccggacgccggcgccgccctggcggggaagctccggtccggcgaccgcagcatggtcgaggtgctggccgaccaccccggggagctggtgcggaccgactcccccaacttcctctgcagcgtcctgcccacccactggcgctgcaacgagaccctgccgatcgccttcaaggtggtggccctcggcgacgtccccgacggcacgctggtgaccgtgatggcggggaacgacgagaactactccgccgagctgcggaacgccaccgccgccatgaagaaccaggtcgcgcgcttcaacgacctccggttcgtgggccgcagcgggcggggcaagtccttcaccctgacgatcaccgtgttcaccaacccgccccaggtcgccacctaccaccgcgccatcaagatcacggtggacgggccccaggagccccggcgccaccggcagaagctggacgaccagaccaagcccggcagcctctccttcagcgagcgcctgtccgagctggagcagctccggcgcaccgccatgcgggtgagcccccaccacccggcccccacccccaacccccgcgcgtccctgaaccacagcacggccttcaacccgcagccccagtcccagatgcaggacacccggcagatccagcccagcccgccctggagctacgaccagtcctaccagtacctgggcagcatcgcctcccccagcgtccaccccgccacccccatctccccggggcgcgccagcggcatgaccacgctctccgcggagctgagctcccgcctgagcaccgcccccgacctcaccgccttctccgacccccggcagttcccggccctgcccagcatctccgacccccgcatgcactaccccggggccttcacctacagcccgacgcccgtgacctccggcatcggcatcgggatgagcgcgatgggctccgccacccggtaccacacctacctgcccccgccctaccccgggagctcccaggcccagggcgggcccttccaggccagcagcccctcctaccacctctactacggcgcgagcgccggctcctaccagttcagcatggtcgggggcgagcgctccccgccccggatcctgccgccctgcacgaacgccagcaccgggtccgccctgctcaaccccagcctgcccaaccagtccgacgtggtggaggccgagggcagccactccaacagccccaccaacatggcgccctccgcccgcctggaggaggccgtgtggcggccgtactgatgatgaggactagtccctgttcccagagcccacttttttttctttttttgaaataaaatagcctgtctttcagatctaaaaaaaaaaaaaaaaaaaaaaaaaaaaaaaaaaaaaaaaaaaaaaaaaaaaaaaaaaaaaaaaaaaaaaaaaaaaaaaaaaaaaaaaaaaaaaaaaaaagaatt

SEQ ID NO: 1459 - RNA, 2095 nt, synthetic construct
  misc_feature 1..2095: note = Homo sapiens____CBFbeta(1-165)_SMMHC(1527-1972) mRNA opt1
  source 1..2095: mol_type = other RNA
aggagagtcccgcagtcggcgtccagcggctctgcttgttcgtgtgtgtgtcgttgcaggccttattcaagcttaccatgccccgcgtggtcccggaccagcggagcaagttcgagaacgaggagttcttccgcaagctgtcccgggagtgcgagatcaagtacaccggcttccgcgaccggccccacgaggagcgccaggcccggttccagaacgcctgccgcgacgggcggagcgagatcgcgttcgtggccaccggcacgaacctctccctgcagttcttccccgccagctggcagggggagcagcgccagaccccctcccgggagtacgtggacctggagcgcgaggccggcaaggtctacctcaaggccccgatgatcctgaacggggtgtgcgtgatctggaagggctggatcgacctgcagcggctcgacggcatggggtgcctggagttcgacgaggagcgcgcgcagcaggaggacgccctggcccagcaggccttcgaggaggcgcggcgccggacccgcgagttcgaggaccgggaccgcagccaccgggaggagatggaggtccacgagctcgagaagtccaagcgcgccctggagacccagatggaggagatgaagacgcagctggaggagctcgaggacgagctgcaggccaccgaggacgccaagctgcgcctcgaggtgaacatgcaggccctgaagggccagttcgagcgggacctgcaggcgcgcgacgagcagaacgaggagaagcggcgccagctccagcggcagctgcacgagtacgagaccgagctggaggacgagcgcaagcagcgggccctcgccgccgccgcgaagaagaagctggagggggacctgaaggacctcgagctgcaggccgacagcgccatcaagggccgcgaggaggccatcaagcagctgcggaagctccaggcccagatgaaggacttccagcgcgagctggaggacgcgcgggcctcccgcgacgagatcttcgccaccgccaaggagaacgagaagaaggccaagagcctggaggcggacctcatgcagctgcaggaggacctggccgccgccgagcgggcgcgcaagcaggccgacctcgagaaggaggagctggccgaggagctggcctccagcctctccgggcggaacgccctgcaggacgagaagcgccggctggaggcgcgcatcgcccagctcgaggaggagctggaggaggagcagggcaacatggaggccatgagcgaccgggtgcgcaaggccacgcagcaggccgagcagctgtccaacgagctcgcgaccgagcgcagcaccgcccagaagaacgagtccgcccggcagcagctggagcgccagaacaaggagctgcggagcaagctccacgagatggagggcgccgtcaagtccaagttcaagagcaccatcgccgcgctggaggccaagatcgcccagctggaggagcaggtcgagcaggaggcccgcgagaagcaggcggccaccaagagcctgaagcagaaggacaagaagctcaaggagatcctgctccaggtggaggacgagcggaagatggccgagcagtacaaggagcaggccgagaaggggaacgcccgcgtgaagcagctgaagcggcagctggaggaggcggaggaggagtcccagcgcatcaacgccaaccggcgcaagctgcagcgggagctcgacgaggccacggagagcaacgaggccatgggccgcgaggtgaacgccctgaagtccaagctgcggcgcgggaacgagaccagcttcgtgccctcccggcgcagcggcggccggcgcgtcatcgagaacgcggacgggtccgaggaggagaccgacacgcgggacgccgacttcaacggcaccaaggccagcgagtgatgatgaggactagtccctgttcccagagcccacttttttttctttttttgaaataaaatagcctgtctttcagatctaaaaaaaaaaaaaaaaaaaaaaaaaaaaaaaaaaaaaaaaaaaaaaaaaaaaaaaaaaaaaaaaaaaaaaaaaaaaaaaaaaaaaaaaaaaaaaaaaaaagaatt

SEQ ID NO: 1460 - RNA, 1810 nt, synthetic construct
  misc_feature 1..1810: note = Artificial____CBFbeta(1-165)_SMMHC(1527-1877) mRNA opt1
  source 1..1810: mol_type = other RNA
aggagagtcccgcagtcggcgtccagcggctctgcttgttcgtgtgtgtgtcgttgcaggccttattcaagcttaccatgccccgcgtggtgccggaccagcggagcaagttcgagaacgaggagttcttccgcaagctgtcccgggagtgcgagatcaagtacacgggcttccgcgaccggccccacgaggagcgccaggcccggttccagaacgcctgccgcgacgggcggagcgagatcgcgttcgtggccaccggcacgaacctgtccctgcagttcttccccgccagctggcagggggagcagcgccagaccccctcccgggagtacgtggacctggagcgcgaggccggcaaggtctacctcaaggccccgatgatcctgaacggggtgtgcgtgatctggaagggctggatcgacctgcagcggctcgacggcatggggtgcctggagttcgacgaggagcgcgcgcagcaggaggacgccctggcccagcaggccttcgaggaggcgcggcgccggacccgcgagttcgaggaccgggaccgcagccaccgggaggagatggaggtccacgagctcgagaagtccaagcgcgccctggagacccagatggaggagatgaagacgcagctggaggagctcgaggacgagctgcaggccaccgaggacgccaagctgcgcctcgaggtgaacatgcaggccctgaagggccagttcgagcgggacctgcaggcgcgcgacgagcagaacgaggagaagcggcgccagctccagcggcagctgcacgagtacgagaccgagctggaggacgagcgcaagcagcgggccctcgccgccgccgcgaagaagaagctggagggggacctgaaggacctcgagctgcaggccgacagcgccatcaagggccgcgaggaggccatcaagcagctgcggaagctccaggcccagatgaaggacttccagcgcgagctggaggacgcgcgggcctcccgcgacgagatcttcgccaccgccaaggagaacgagaagaaggccaagagcctggaggcggacctcatgcagctgcaggaggacctggccgccgccgagcgggcgcgcaagcaggccgacctcgagaaggaggagctggccgaggagctggcctccagcctctccgggcggaacgccctgcaggacgagaagcgccggctggaggcgcgcatcgcccagctcgaggaggagctggaggaggagcagggcaacatggaggccatgagcgaccgggtgcgcaaggccacgcagcaggccgagcagctgtccaacgagctcgcgaccgagcgcagcaccgcccagaagaacgagtccgcccggcagcagctggagcgccagaacaaggagctgcggagcaagctccacgagatggagggcgccgtcaagtccaagttcaagagcaccatcgccgcgctggaggccaagatcgcccagctggaggagcaggtcgagcaggaggcccgcgagaagcaggcggccaccaagagcctgaagcagaaggacaagaagctcaaggagatcctgctccaggtggaggacgagcggaagatggccgagcagtacaaggagcaggccgagaaggggaacgcctgatgatgaggactagtccctgttcccagagcccacttttttttctttttttgaaataaaatagcctgtctttcagatctaaaaaaaaaaaaaaaaaaaaaaaaaaaaaaaaaaaaaaaaaaaaaaaaaaaaaaaaaaaaaaaaaaaaaaaaaaaaaaaaaaaaaaaaaaaaaaaaaaaagaatt

SEQ ID NO: 1461 - RNA, 871 nt, synthetic construct
  misc_feature 1..871: note = Artificial____CBFbeta(1-165)_Linker_Lifeact mRNA opt1
  source 1..871: mol_type = other RNA
aggagagtcccgcagtcggcgtccagcggctctgcttgttcgtgtgtgtgtcgttgcaggccttattcaagcttaccatgccccgcgtggtccccgaccagcggagcaagttcgagaacgaggagttcttccgcaagctgtcccgggagtgcgagatcaagtacaccggcttccgcgaccggccccacgaggagcgccaggcccggttccagaacgcctgccgcgacgggcggagcgagatcgcgttcgtggccaccggcacgaacctctccctgcagttcttccccgccagctggcagggggagcagcgccagaccccctcccgggagtacgtggacctggagcgcgaggccggcaaggtctacctcaaggccccgatgatcctgaacggggtgtgcgtgatctggaagggctggatcgacctgcagcggctcgacggcatggggtgcctggagttcgacgaggagcgcgcgcagcaggaggacgccctggcccagcaggccttcgaggaggcgcggcgccggacccgcgagttcgaggaccgggaccgcagccaccgggaggagatggagggcgggtccggcgggagcggcggctccgggggcagcgggggcggcggggtcgccgacctcatcaagaagttcgagtccatcagcaaggaggagggcgacccgcccgtggccacctgatgatgaggactagtccctgttcccagagcccacttttttttctttttttgaaataaaatagcctgtctttcagatctaaaaaaaaaaaaaaaaaaaaaaaaaaaaaaaaaaaaaaaaaaaaaaaaaaaaaaaaaaaaaaaaaaaaaaaaaaaaaaaaaaaaaaaaaaaaaaaaaaaagaatt

SEQ ID NO: 1462 - RNA, 838 nt, synthetic construct
  misc_feature 1..838: note = Artificial____CBFbeta(1-165)_HIF1alpha(549-575) mRNA opt1
  source 1..838: mol_type = other RNA
aggagagtcccgcagtcggcgtccagcggctctgcttgttcgtgtgtgtgtcgttgcaggccttattcaagcttaccatgccccgcgtggtcccggaccagcggagcaagttcgagaacgaggagttcttccgcaagctgtcccgggagtgcgagatcaagtacaccggcttccgcgaccggccccacgaggagcgccaggcccggttccagaacgcctgccgcgacgggcggagcgagatcgcgttcgtggccaccggcacgaacctctccctgcagttcttccccgccagctggcagggggagcagcgccagaccccctcccgggagtacgtggacctggagcgcgaggccggcaaggtctacctcaaggccccgatgatcctgaacggggtgtgcgtgatctggaagggctggatcgacctgcagcggctcgacggcatggggtgcctggagttcgacgaggagcgcgcgcagcaggaggacgccctggcccagcaggccttcgaggaggcgcggcgccggacccgcgagttcgaggaccgggaccgcagccaccgggaggagatggagcccttctccacccaggacacggacctcgacctggagatgctggccccctacatccccatggacgacgacttccagctccgctgatgatgaggactagtccctgttcccagagcccacttttttttctttttttgaaataaaatagcctgtctttcagatctaaaaaaaaaaaaaaaaaaaaaaaaaaaaaaaaaaaaaaaaaaaaaaaaaaaaaaaaaaaaaaaaaaaaaaaaaaaaaaaaaaaaaaaaaaaaaaaaaaaagaatt

SEQ ID NO: 1463 - RNA, 883 nt, synthetic construct
  misc_feature 1..883: note Artificial____CBFbeta(1-165)_Linker_HIF1alpha(549-575) mRNA opt1
  source 1..883: mol_type = other RNA
aggagagtcccgcagtcggcgtccagcggctctgcttgttcgtgtgtgtgtcgttgcaggccttattcaagcttaccatgccccgcgtggtcccggaccagcggagcaagttcgagaacgaggagttcttccgcaagctgtcccgggagtgcgagatcaagtacaccggcttccgcgaccggccccacgaggagcgccaggcccggttccagaacgcctgccgcgacgggcggagcgagatcgcgttcgtggccaccggcacgaacctctccctgcagttcttccccgccagctggcagggggagcagcgccagaccccctcccgggagtacgtggacctggagcgcgaggccggcaaggtctacctcaaggccccgatgatcctgaacggggtgtgcgtgatctggaagggctggatcgacctgcagcggctcgacggcatggggtgcctggagttcgacgaggagcgcgcgcagcaggaggacgccctggcccagcaggccttcgaggaggcgcggcgccggacccgcgagttcgaggaccgggaccgcagccaccgggaggagatggagggcgggtccggcgggagcggcggctccgggggcagcgggggcggccccttctccacccaggacacggacctcgacctggagatgctggccccctacatccccatggacgacgacttccagctccgctgatgatgaggactagtccctgttcccagagcccacttttttttctttttttgaaataaaatagcctgtctttcagatctaaaaaaaaaaaaaaaaaaaaaaaaaaaaaaaaaaaaaaaaaaaaaaaaaaaaaaaaaaaaaaaaaaaaaaaaaaaaaaaaaaaaaaaaaaaaaaaaaaaagaatt

SEQ ID NO: 1464 - RNA, 2518 nt, synthetic construct
  misc_feature 1..2518: note = Artificial____RUNX1(1-177)_N_RUNX1T1a(31-604) mRNA opt1
  source 1..2518: mol_type = other RNA
aggagagtcccgcagtcggcgtccagcggctctgcttgttcgtgtgtgtgtcgttgcaggccttattcaagcttaccatgcgcatccccgtggacgccagcacctcccggcgcttcaccccgcccagcacggccctgtcccccggcaagatgagcgaggcgctccccctgggggccccggacgccggcgccgccctggcggggaagctccggtccggcgaccgcagcatggtcgaggtgctggccgaccaccccggggagctggtgcggaccgactcccccaacttcctctgcagcgtcctgcccacccactggcgctgcaacaagaccctgccgatcgccttcaaggtggtggccctcggcgacgtccccgacggcacgctggtgaccgtgatggcggggaacgacgagaactactccgccgagctgcggaacgccaccgccgccatgaagaaccaggtcgcgcgcttcaacgacctccggttcgtgggccgcagcgggcggggcaagtccttcaccctgacgatcaccgtgttcaccaaccccccccaggtcgccacctaccaccgcgccatcaagatcacggtggacgggccgcgggagccccgcaaccggaccgagaagcacagcaccatgcccgactcccccgtggacgtcaagacccagagccgcctgacgccgcccaccatgccccccccgcccaccacccagggcgccccccggacgtccagcttcacccccaccaccctcacgaacggcacctcccacagcccgaccgccctgaacggggcgccctccccccccaacggcttcagcaacgggccgagctccagctccagctccagcctggccaaccagcagctcccccccgcctgcggcgcccgccagctgtccaagctgaagcggttcctcaccacgctgcagcagttcggcaacgacatcagcccggagatcggggagcgcgtgcggaccctggtgctcggcctggtcaactccaccctgaccatcgaggagttccacagcaagctccaggaggccacgaacttccccctgcgccccttcgtgatccccttcctgaaggcgaacctcccgctgctgcagcgcgagctcctgcactgcgcccggctggccaagcagaaccccgcccagtacctcgcccagcacgagcagctgctgctcgacgcgtccaccaccagccccgtggactccagcgagctgctgctcgacgtcaacgagaacgggaagcgccggacccccgaccgcacgaaggagaacggcttcgaccgggagccgctgcactccgagcaccccagcaagcgcccctgcaccatctcccccgggcagcggtacagcccgaacaacggcctgtcctaccagcccaacggcctcccccaccccaccccgccccccccccagcactaccgcctggacgacatggccatcgcccaccactaccgggacagctaccgccacccgagccaccgggacctgcgcgaccggaaccgccccatggggctgcacggcacccggcaggaggagatgatcgaccaccgcctcaccgaccgggagtgggccgaggagtggaagcacctggaccacctgctcaactgcatcatggacatggtggagaagacgcgccggtccctgaccgtgctgcgccgctgccaggaggcggaccgggaggagctcaactactggatccgccggtacagcgacgccgaggacctgaagaaggggggcgggtccagctccagccactcccgccagcagagccccgtcaaccccgacccggtggccctggacgcccaccgggagttcctccaccgccccgcctccggctacgtccccgaggagatctggaagaaggcggaggaggccgtgaacgaggtgaagcggcaggccatgaccgagctgcagaaggccgtcagcgaggccgagcgcaaggcgcacgacatgatcaccacggagcgggccaagatggagcgcaccgtggccgaggccaagcggcaggccgcggaggacgccctggccgtgatcaaccagcaggaggactccagcgagtcctgctggaactgcggccgcaaggccagcgagacctgctccgggtgcaacaccgcgcggtactgcggcagcttctgccagcacaaggactgggagaagcaccaccacatctgcgggcagacgctccaggcccagcagcagggcgacaccccggccgtctccagcagcgtgacccccaactccggggccggcagccccatggacacccccccggccgcgacgccccgctccaccacccccggcacccccagcacgatcgagaccaccccgcggtgatgatgaggactagtccctgttcccagagcccacttttttttctttttttgaaataaaatagcctgtctttcagatctaaaaaaaaaaaaaaaaaaaaaaaaaaaaaaaaaaaaaaaaaaaaaaaaaaaaaaaaaaaaaaaaaaaaaaaaaaaaaaaaaaaaaaaaaaaaaaaaaaaagaatt

SEQ ID NO: 1465 - RNA, 1033 nt, synthetic construct
  misc_feature 1..1033: note = Artificial____RUNX1(1-241)_RUNX1T1b(short) mRNA opt1
  source 1..1033: mol_type = other RNA
aggagagtcccgcagtcggcgtccagcggctctgcttgttcgtgtgtgtgtcgttgcaggccttattcaagcttaccatgcgcatccccgtggacgccagcacctcccggcgcttcaccccgcccagcacggccctgtcccccggcaagatgagcgaggcgctccccctgggggccccggacgccggcgccgccctggcggggaagctccggtccggcgaccgcagcatggtcgaggtgctggccgaccaccccggggagctggtgcggaccgactcccccaacttcctctgcagcgtcctgcccacccactggcgctgcaacaagaccctgccgatcgccttcaaggtggtggccctcggcgacgtccccgacggcacgctggtgaccgtgatggcggggaacgacgagaactactccgccgagctgcggaacgccaccgccgccatgaagaaccaggtcgcgcgcttcaacgacctccggttcgtgggccgcagcgggcggggcaagtccttcaccctgacgatcaccgtgttcaccaacccgccccaggtcgccacctaccaccgcgccatcaagatcacggtggacgggccccgggagccccgccggcaccgccagaagctggacgaccagaccaagcccggcagcctctccttcagcgagcggctgtccgagctggagcagctccgccggaccgccatgcgcgtgagcccccaccacccggcccccacccccaacccccgggcgtccctgaaccacagcacggccttcaacccgcagccccagtcccagatgcaggaggtcggcttctgccacgtggcccaggtggggctgaagctcctgggctgatgatgaggactagtccctgttcccagagcccacttttttttctttttttgaaataaaatagcctgtctttcagatctaaaaaaaaaaaaaaaaaaaaaaaaaaaaaaaaaaaaaaaaaaaaaaaaaaaaaaaaaaaaaaaaaaaaaaaaaaaaaaaaaaaaaaaaaaaaaaaaaaaagaatt

SEQ ID NO: 1466 - RNA, 2737 nt, synthetic construct
  misc_feature 1..2737: note = Artificial____RUNX1(1-241)_V_RUNX1T1b(22-604) mRNA opt1
  source 1..2737: mol_type = other RNA
aggagagtcccgcagtcggcgtccagcggctctgcttgttcgtgtgtgtgtcgttgcaggccttattcaagcttaccatgcgcatccccgtggacgccagcacctcccggcgcttcaccccgcccagcacggccctgtcccccggcaagatgagcgaggcgctccccctgggggccccggacgccggcgccgccctggcggggaagctccggtccggcgaccgcagcatggtcgaggtgctggccgaccaccccggggagctggtgcggaccgactcccccaacttcctctgcagcgtcctgcccacccactggcgctgcaacaagaccctgccgatcgccttcaaggtggtggccctcggcgacgtccccgacggcacgctggtgaccgtgatggcggggaacgacgagaactactccgccgagctgcggaacgccaccgccgccatgaagaaccaggtcgcgcgcttcaacgacctccggttcgtgggccgcagcgggcggggcaagtccttcaccctgacgatcaccgtgttcaccaacccgccccaggtcgccacctaccaccgcgccatcaagatcacggtggacgggccccgggagccccgccggcaccgccagaagctggacgaccagaccaagcccggcagcctctccttcagcgagcggctgtccgagctggagcagctccgccggaccgccatgcgcgtgagcccccaccacccggcccccacccccaacccccgggcgtccctgaaccacagcacggccttcaacccgcagccccagtcccagatgcaggtcggccccgagaagcgcgtgcccgccatgccggggagccccgtggaggtcaagatccagagccgctccagcccgcccaccatgccgcccctgcccccgatcaaccccggcgggccccggcccgtgtccttcacccccaccgccctcagcaacggcatcaaccactccccgcccacgctgaacggcgcccccagcccgccccagcgcttctccaacgggcccgcgagctccaccagctccgccctgaccaaccagcagctccccgcgacctgcggcgcccggcagctgagcaagctgaagcgcttcctcacgaccctgcagcagttcgggaacgacatctcccccgagatcggcgagaaggtgcggaccctggtcctcgccctggtgaacagcaccgtgacgatcgaggagttccactgcaagctgcaggaggccaccaacttccccctccgccccttcgtcatccccttcctgaaggccaacctgccgctcctgcagcgggagctgctccactgcgcccgcgccgcgaagcagaccccctcccagtacctggcccagcacgagcacctcctgctgaacaccagcatcgcctcccccgccgacagctccgagctgctcatggaggtgcacgggaacggcaagcggcccagcccggagcgccgggaggagaacagcttcgaccgcgacacgatcgcccccgagccgcccgcgaagcgggtctgcaccatctcccccgcgccccgccacagccccgccctgaccgtgccgctgatgaaccccggcgggcagttccaccccacgcccccgcccctgcagcactacaccctcgaggacatcgccacctcccacctgtaccgggagcccaacaagatgctggagcaccgcgaggtgcgggaccgccaccacagcctcggcctgaacgggggctaccaggacgagctggtcgaccaccggctcaccgagcgcgagtgggccgacgagtggaagcacctggaccacgccctgaactgcatcatggagatggtggagaagacccgccggtccatggccgtgctccgccggtgccaggagagcgaccgcgaggagctgaactactggaagcggcgctacaacgagaacaccgagctgcggaagacggggaccgagctcgtctcccgccagcacagccccggctccgccgacagcctgtccaacgacagccagcgggagttcaactcccgcccgggcaccgggtacgtgcccgtggagttctggaagaagaccgaggaggccgtcaacaaggtgaagatccaggccatgagcgaggtgcagaaggcggtcgccgaggccgagcagaaggccttcgaggtgatcgcgacggagcgggcccgcatggagcagaccatcgccgacgtgaagcggcaggccgccgaggacgcgttcctggtcatcaacgagcaggaggagtccaccgagaactgctggaactgcggccgcaaggccagcgagacctgctccgggtgcaacatcgcccggtactgcggcagcttctgccagcacaaggactgggagcgccaccaccggctctgcgggcagaacctgcacggccagagcccccacggccaggggcgccccctgctcccggtgggccgggggtccagcgcccgctccgccgactgcagcgtgccctcccccgcgctggacaagacgagcgccaccacctcccggagctccacccccgccagcgtcacggccatcgacaccaacggcctgtgatgatgaggactagtccctgttcccagagcccacttttttttctttttttgaaataaaatagcctgtctttcagatctaaaaaaaaaaaaaaaaaaaaaaaaaaaaaaaaaaaaaaaaaaaaaaaaaaaaaaaaaaaaaaaaaaaaaaaaaaaaaaaaaaaaaaaaaaaaaaaaaaaagaatt

SEQ ID NO: 1467 - RNA, 2737 nt, synthetic construct
  misc_feature 1..2737: note = Artificial____RUNX1(1-241)_I_RUNX1T1b(22-604) mRNA opt1
  source 1..2737: mol_type = other RNA
aggagagtcccgcagtcggcgtccagcggctctgcttgttcgtgtgtgtgtcgttgcaggccttattcaagcttaccatgcgcatccccgtggacgccagcacctcccggcgcttcaccccgcccagcacggccctgtcccccggcaagatgagcgaggcgctccccctgggggccccggacgccggcgccgccctggcggggaagctccggtccggcgaccgcagcatggtcgaggtgctggccgaccaccccggggagctggtgcggaccgactcccccaacttcctctgcagcgtcctgcccacccactggcgctgcaacaagaccctgccgatcgccttcaaggtggtggccctcggcgacgtccccgacggcacgctggtgaccgtgatggcggggaacgacgagaactactccgccgagctgcggaacgccaccgccgccatgaagaaccaggtcgcgcgcttcaacgacctccggttcgtgggccgcagcgggcggggcaagtccttcaccctgacgatcaccgtgttcaccaacccgccccaggtcgccacctaccaccgcgccatcaagatcacggtggacgggccccgggagccccgccggcaccgccagaagctggacgaccagaccaagcccggcagcctctccttcagcgagcggctgtccgagctggagcagctccgccggaccgccatgcgcgtgagcccccaccacccggcccccacccccaacccccgggcgtccctgaaccacagcacggccttcaacccgcagccccagtcccagatgcagatcggccccgagaagcgcgtccccgccatgccggggagccccgtggaggtgaagatccagagccgctccagcccgcccaccatgccgcccctgcccccgatcaaccccggcgggccccggcccgtctccttcacccccaccgccctcagcaacggcatcaaccactccccgcccacgctgaacggcgcccccagcccgccccagcgcttctccaacgggcccgcgagctccaccagctccgccctgaccaaccagcagctccccgcgacctgcggcgcccggcagctgagcaagctgaagcgcttcctcacgaccctgcagcagttcgggaacgacatctcccccgagatcggcgagaaggtgcggaccctggtgctcgccctggtcaacagcaccgtgacgatcgaggagttccactgcaagctgcaggaggccaccaacttccccctccgccccttcgtgatccccttcctgaaggccaacctgccgctcctgcagcgggagctgctccactgcgcccgcgccgcgaagcagaccccctcccagtacctggcccagcacgagcacctcctgctgaacaccagcatcgcctcccccgccgacagctccgagctgctcatggaggtccacgggaacggcaagcggcccagcccggagcgccgggaggagaacagcttcgaccgcgacacgatcgcccccgagccgcccgcgaagcgggtgtgcaccatctcccccgcgccccgccacagccccgccctgaccgtcccgctgatgaaccccggcgggcagttccaccccacgcccccgcccctgcagcactacaccctcgaggacatcgccacctcccacctgtaccgggagcccaacaagatgctggagcaccgcgaggtgcgggaccgccaccacagcctcggcctgaacgggggctaccaggacgagctggtggaccaccggctcaccgagcgcgagtgggccgacgagtggaagcacctggaccacgccctgaactgcatcatggagatggtcgagaagacccgccggtccatggccgtgctccgccggtgccaggagagcgaccgcgaggagctgaactactggaagcggcgctacaacgagaacaccgagctgcggaagacggggaccgagctcgtgtcccgccagcacagccccggctccgccgacagcctgtccaacgacagccagcgggagttcaactcccgcccgggcaccgggtacgtccccgtggagttctggaagaagaccgaggaggccgtgaacaaggtcaagatccaggccatgagcgaggtgcagaaggcggtggccgaggccgagcagaaggccttcgaggtcatcgcgacggagcgggcccgcatggagcagaccatcgccgacgtgaagcggcaggccgccgaggacgcgttcctggtgatcaacgagcaggaggagtccaccgagaactgctggaactgcggccgcaaggccagcgagacctgctccgggtgcaacatcgcccggtactgcggcagcttctgccagcacaaggactgggagcgccaccaccggctctgcgggcagaacctgcacggccagagcccccacggccaggggcgccccctgctcccggtcggccgggggtccagcgcccgctccgccgactgcagcgtgccctcccccgcgctggacaagacgagcgccaccacctcccggagctccacccccgccagcgtgacggccatcgacaccaacggcctgtgatgatgaggactagtccctgttcccagagcccacttttttttctttttttgaaataaaatagcctgtctttcagatctaaaaaaaaaaaaaaaaaaaaaaaaaaaaaaaaaaaaaaaaaaaaaaaaaaaaaaaaaaaaaaaaaaaaaaaaaaaaaaaaaaaaaaaaaaaaaaaaaaaagaatt

SEQ ID NO: 1468 - RNA, 1621 nt, synthetic construct
  misc_feature 1..1621: note = Homo sapiens__Q01196-1__RUNX1(K83E_R174Q) mRNA opt3
  source 1..1621: mol_type = other RNA
aggagagtcccgcagtcggcgtccagcggctctgcttgttcgtgtgtgtgtcgttgcaggccttattcaagcttaccatgagaatccccgtggatgccagcaccagcagaagattcacccctcctagcaccgctctgagccctggcaagatgtctgaagctctgcctctgggagcacctgatgctggtgcagctctggccggaaaactgagaagcggcgacagatccatggtggaagtgctggctgatcaccccggcgaacttgtgcggacagacagccctaatttcctgtgcagcgtgctgcctacacactggcggtgcaatgagacactgcctatcgccttcaaggtggtggccctgggagatgtgcctgatggcacactggttacagtgatggccggcaacgacgagaactacagcgccgagctgagaaatgccaccgccgccatgaagaaccaggtggccagattcaacgacctgagattcgtgggcagaagcggcaggggcaagagctttaccctgaccatcaccgtgttcaccaatcctccacaggtggcaacctaccaccgggccatcaagatcacagtggacggccctcaagagcccagacggcacagacagaaactggacgaccagaccaagcctggcagcctgagctttagcgagagactgagcgagctggaacagctgagaagaaccgccatgcgggtgtccccacatcaccctgctcctacacctaatcctcgggccagcctgaatcacagcaccgcctttaatccccagcctcagagccagatgcaggacaccagacagattcagccttctccaccttggagctacgaccagagctaccagtacctgggctctatcgcctctcctagcgtgcaccctgccacacctattagtcctggcagagccagcggcatgacaacactgtctgccgagctgtccagcagactgagcacagcccctgatctgaccgccttcagcgaccctagacagttccctgctctgcccagcatctctgaccccagaatgcattaccctggcgccttcacatacagccccacacctgtgacaagcggcatcggcattggcatgtctgccatgggaagcgccaccagataccacacctacctgcctccaccttatcctggcagctctcaggctcaaggcggcccttttcaggccagctctccttcctaccacctgtactatggcgccagcgccggctcctaccagttttctatggttggaggcgagcggagccctcctagaatcctgcctccttgtaccaacgccagcacaggatctgccctgctgaatcccagcctgcctaatcagagcgacgtggtggaagccgagggcagccatagcaacagccctaccaatatggcccctagcgccagactggaagaggccgtttggaggccttactgatgatgaggactagtccctgttcccagagcccacttttttttctttttttgaaataaaatagcctgtctttcagatctaaaaaaaaaaaaaaaaaaaaaaaaaaaaaaaaaaaaaaaaaaaaaaaaaaaaaaaaaaaaaaaaaaaaaaaaaaaaaaaaaaaaaaaaaaaaaaaaaaaagaatt

SEQ ID NO: 1469 - RNA, 2095 nt, synthetic construct
  misc_feature 1..2095: note = Homo sapiens____CBFbeta(1-165)_SMMHC(1527-1972) mRNA opt3
  source 1..2095: mol_type = other RNA
aggagagtcccgcagtcggcgtccagcggctctgcttgttcgtgtgtgtgtcgttgcaggccttattcaagcttaccatgcctagagtggtgcccgaccagagaagcaagttcgagaacgaagagttctttcggaagctgagcagagagtgcgagatcaagtacaccggcttccgggacagaccccacgaagaaagacaggccagattccagaacgcctgcagagatggcagatccgagatcgcctttgtggccaccggcaccaatctgagcctgcagttctttccagcctcctggcagggcgagcagagacaaacacccagcagagaatacgtggacctggaacgcgaggccggcaaggtgtacctgaaggcccctatgatcctgaacggcgtgtgcgtgatctggaaaggctggatcgatctgcagcggctggatggcatgggctgcctggaatttgacgaggaaagagcccagcaagaggacgcccttgctcagcaggcctttgaggaagccagaaggcggaccagagagttcgaggacagagacagatcccaccgggaagagatggaagtgcacgagctggaaaagagcaagagagccctggaaacccagatggaagaaatgaagacccagctcgaggaactcgaggacgagctgcaggccacagaggatgccaagctgagactggaagtgaacatgcaggccctgaagggccagttcgagagagatctgcaggctagggacgagcagaacgaggaaaagcggagacagctgcagaggcagctgcacgagtacgagacagagctggaagatgagcggaagcagagagcactggccgctgccgccaagaagaaactggaaggcgacctgaaggatctggaactccaggccgacagcgccatcaagggaagagaagaggccatcaagcagctgcggaagctgcaagcccagatgaaggacttccagcgcgagttggaagatgccagagccagcagggatgagatcttcgccaccgccaaagagaacgagaagaaggccaagagcctggaagccgatctgatgcagctccaagaggatctggctgccgccgagagagccagaaaacaggccgacctggaaaaagaggaactggccgaagaactggccagcagcctgtctggcagaaacgctctgcaggacgagaagagaaggctggaagccaggatcgcccagttggaggaagaactcgaagaggaacagggcaacatggaagccatgagcgacagagtgcggaaggccacacagcaggctgagcagctgagcaatgagctggccaccgagagaagcacagcccagaagaatgagagcgccaggcagcagctcgagcggcagaacaaagagctgagaagcaaactgcacgaaatggaaggggccgtgaagtccaagttcaagagcacaatcgccgctctcgaggccaagatcgctcagctcgaagaacaggtggaacaagaggcccgggaaaagcaggccgccacaaagtctctgaagcagaaggacaagaagctgaaagaaatcctgctgcaggtcgaggatgagagaaagatggccgagcagtacaaagaacaggctgagaagggcaacgccagagtgaagcagctgaaacggcaactggaagaggccgaggaagagtcccagagaatcaacgccaacagacggaaactgcagagagagctggacgaagccaccgagtccaatgaggccatgggcagagaagtgaacgccctgaagtctaagctgcggagaggcaacgaaaccagcttcgtgcccagcagaagatccggcggcagaagagtgatcgagaacgccgatggctctgaggaagaaaccgacaccagagatgccgacttcaacggcacaaaggccagcgagtaatgatgaggactagtccctgttcccagagcccacttttttttctttttttgaaataaaatagcctgtctttcagatctaaaaaaaaaaaaaaaaaaaaaaaaaaaaaaaaaaaaaaaaaaaaaaaaaaaaaaaaaaaaaaaaaaaaaaaaaaaaaaaaaaaaaaaaaaaaaaaaaaaagaatt

SEQ ID NO: 1470 - RNA, 1810 nt, synthetic construct
  misc_feature 1..1810: note = Artificial____CBFbeta(1-165)_SMMHC(1527-1877) mRNA opt3
  source 1..1810: mol_type = other RNA
aggagagtcccgcagtcggcgtccagcggctctgcttgttcgtgtgtgtgtcgttgcaggccttattcaagcttaccatgcctagagtggtgcccgaccagagaagcaagttcgagaacgaagagttctttcggaagctgagcagagagtgcgagatcaagtacaccggcttccgggacagaccccacgaagaaagacaggccagattccagaacgcctgcagagatggcagatccgagatcgcctttgtggccaccggcaccaatctgagcctgcagttctttccagcctcctggcagggcgagcagagacaaacacccagcagagaatacgtggacctggaacgcgaggccggcaaggtgtacctgaaggcccctatgatcctgaacggcgtgtgcgtgatctggaaaggctggatcgatctgcagcggctggatggcatgggctgcctggaatttgacgaggaaagagcccagcaagaggacgcccttgctcagcaggcctttgaggaagccagaaggcggaccagagagttcgaggacagagacagatcccaccgggaagagatggaagtgcacgagctggaaaagagcaagagagccctggaaacccagatggaagaaatgaagacccagctcgaggaactcgaggacgagctgcaggccacagaggatgccaagctgagactggaagtgaacatgcaggccctgaagggccagttcgagagagatctgcaggctagggacgagcagaacgaggaaaagcggagacagctgcagaggcagctgcacgagtacgagacagagctggaagatgagcggaagcagagagcactggccgctgccgccaagaagaaactggaaggcgacctgaaggatctggaactccaggccgacagcgccatcaagggaagagaagaggccatcaagcagctgcggaagctgcaagcccagatgaaggacttccagcgcgagttggaagatgccagagccagcagggatgagatcttcgccaccgccaaagagaacgagaagaaggccaagagcctggaagccgatctgatgcagctccaagaggatctggctgccgccgagagagccagaaaacaggccgacctggaaaaagaggaactggccgaagaactggccagcagcctgtctggcagaaacgctctgcaggacgagaagagaaggctggaagccaggatcgcccagttggaggaagaactcgaagaggaacagggcaacatggaagccatgagcgacagagtgcggaaggccacacagcaggctgagcagctgagcaatgagctggccaccgagagaagcacagcccagaagaatgagagcgccaggcagcagctcgagcggcagaacaaagagctgagaagcaaactgcacgaaatggaaggggccgtgaagtccaagttcaagagcacaatcgccgctctcgaggccaagatcgctcagctcgaagaacaggtggaacaagaggcccgggaaaagcaggccgccacaaagtctctgaagcagaaggacaagaagctgaaagaaatcctgctgcaggtcgaggatgagagaaagatggccgagcagtacaaagaacaggctgagaagggcaacgcctgatgatgaggactagtccctgttcccagagcccacttttttttctttttttgaaataaaatagcctgtctttcagatctaaaaaaaaaaaaaaaaaaaaaaaaaaaaaaaaaaaaaaaaaaaaaaaaaaaaaaaaaaaaaaaaaaaaaaaaaaaaaaaaaaaaaaaaaaaaaaaaaaaagaatt

SEQ ID NO: 1471 - RNA, 871 nt, synthetic construct
  misc_feature 1..871: note = Artificial____CBFbeta(1-165)_Linker_Lifeact mRNA opt3
  source 1..871: mol_type = other RNA
aggagagtcccgcagtcggcgtccagcggctctgcttgttcgtgtgtgtgtcgttgcaggccttattcaagcttaccatgcctagagtggtgcccgaccagagaagcaagttcgagaacgaagagttctttcggaagctgagcagagagtgcgagatcaagtacaccggcttccgggacagaccccacgaagaaagacaggccagattccagaacgcctgcagagatggcagatccgagatcgcctttgtggccaccggcaccaatctgagcctgcagttctttccagcctcctggcagggcgagcagagacaaacacccagcagagaatacgtggacctggaacgcgaggccggcaaggtgtacctgaaggcccctatgatcctgaacggcgtgtgcgtgatctggaaaggctggatcgatctgcagcggctggatggcatgggctgcctggaatttgacgaggaaagagcccagcaagaggacgcccttgctcagcaggcctttgaggaagccagaaggcggaccagagagttcgaggacagagacagatcccaccgggaagagatggaaggcggatctggtggaagcggaggtagcggaggatcaggcggaggcggagttgccgatctgatcaagaagttcgagtccatcagcaaagaagagggcgaccctccagtggccacatgatgatgaggactagtccctgttcccagagcccacttttttttctttttttgaaataaaatagcctgtctttcagatctaaaaaaaaaaaaaaaaaaaaaaaaaaaaaaaaaaaaaaaaaaaaaaaaaaaaaaaaaaaaaaaaaaaaaaaaaaaaaaaaaaaaaaaaaaaaaaaaaaaagaatt

SEQ ID NO: 1472 - RNA, 838 nt, synthetic construct
  misc_feature 1..838: note = Artificial____CBFbeta(1-165)_HIF1alpha(549-575) mRNA opt3
  source 1..838: mol_type = other RNA
aggagagtcccgcagtcggcgtccagcggctctgcttgttcgtgtgtgtgtcgttgcaggccttattcaagcttaccatgcctagagtggtgcccgaccagagaagcaagttcgagaacgaagagttctttcggaagctgagcagagagtgcgagatcaagtacaccggcttccgggacagaccccacgaagaaagacaggccagattccagaacgcctgcagagatggcagatccgagatcgcctttgtggccaccggcaccaatctgagcctgcagttctttccagcctcctggcagggcgagcagagacaaacacccagcagagaatacgtggacctggaacgcgaggccggcaaggtgtacctgaaggcccctatgatcctgaacggcgtgtgcgtgatctggaaaggctggatcgatctgcagcggctggatggcatgggctgcctggaatttgacgaggaaagagcccagcaagaggacgcccttgctcagcaggcctttgaggaagccagaaggcggaccagagagttcgaggacagagacagatcccaccgggaagagatggaacccttcagcacccaagacaccgacctggacctcgaaatgctggccccttacatccccatggacgacgacttccagctgcggtaatgatgaggactagtccctgttcccagagcccacttttttttctttttttgaaataaaatagcctgtctttcagatctaaaaaaaaaaaaaaaaaaaaaaaaaaaaaaaaaaaaaaaaaaaaaaaaaaaaaaaaaaaaaaaaaaaaaaaaaaaaaaaaaaaaaaaaaaaaaaaaaaaagaatt

SEQ ID NO: 1473 - RNA, 883 nt, synthetic construct
  misc_feature 1..883: note Artificial____CBFbeta(1-165)_Linker_HIF1alpha(549-575) mRNA opt3
  source 1..883: mol_type = other RNA
aggagagtcccgcagtcggcgtccagcggctctgcttgttcgtgtgtgtgtcgttgcaggccttattcaagcttaccatgcctagagtggtgcccgaccagagaagcaagttcgagaacgaagagttctttcggaagctgagcagagagtgcgagatcaagtacaccggcttccgggacagaccccacgaagaaagacaggccagattccagaacgcctgcagagatggcagatccgagatcgcctttgtggccaccggcaccaatctgagcctgcagttctttccagcctcctggcagggcgagcagagacaaacacccagcagagaatacgtggacctggaacgcgaggccggcaaggtgtacctgaaggcccctatgatcctgaacggcgtgtgcgtgatctggaaaggctggatcgatctgcagcggctggatggcatgggctgcctggaatttgacgaggaaagagcccagcaagaggacgcccttgctcagcaggcctttgaggaagccagaaggcggaccagagagttcgaggacagagacagatcccaccgggaagagatggaaggcggatctggtggaagcggaggtagcggaggatctggcggaggacctttcagcacccaagacaccgacctggacctcgaaatgctggccccttacatccccatggacgacgacttccagctgcggtaatgatgaggactagtccctgttcccagagcccacttttttttctttttttgaaataaaatagcctgtctttcagatctaaaaaaaaaaaaaaaaaaaaaaaaaaaaaaaaaaaaaaaaaaaaaaaaaaaaaaaaaaaaaaaaaaaaaaaaaaaaaaaaaaaaaaaaaaaaaaaaaaaagaatt

SEQ ID NO: 1474 - RNA, 2518 nt, synthetic construct
  misc_feature 1..2518: note = Artificial____RUNX1(1-177)_N_RUNX1T1a(31-604) mRNA opt3
  source 1..2518: mol_type = other RNA
aggagagtcccgcagtcggcgtccagcggctctgcttgttcgtgtgtgtgtcgttgcaggccttattcaagcttaccatgagaatccccgtggatgccagcaccagcagaagattcacccctcctagcaccgctctgagccctggcaagatgtctgaagctctgcctctgggagcacctgatgctggtgcagctctggccggaaaactgagaagcggcgacagatccatggtggaagtgctggctgatcaccccggcgaacttgtgcggacagacagccctaatttcctgtgcagcgtgctgcctacacactggcggtgcaacaagacactgcctatcgccttcaaggtggtggctctgggagatgtgcctgatggcacactggtcacagtgatggccggcaacgacgagaattacagcgccgagctgagaaatgccaccgccgccatgaagaaccaggtggccagattcaacgacctgagattcgtgggcagaagcggcaggggcaagagctttaccctgaccatcaccgtgttcaccaatcctccacaggtggcaacctaccaccgggccatcaagatcaccgtggatggccctagagagccccggaacagaacagagaagcacagcaccatgcctgacagccccgtggacgtgaaaacccagagcagactgacccctccaaccatgcctcctccacctacaacacagggcgctcctagaaccagcagcttcacccctaccacactgaccaacggcacctctcacagccccacagctcttaatggcgccccttctccacctaacggcttcagcaatggcccaagcagcagcagctctagcagcctggctaatcagcagctgcctcctgcttgtggcgctagacagctgagcaagctgaagcggttcctgaccacactgcagcagttcggcaacgatatcagccccgagatcggcgagcgcgtcagaacactggttctgggcctcgtgaatagcaccctgacaatcgaagagttccacagcaagctgcaagaggccaccaactttccgctgcggcctttcgtgatcccattcctgaaggccaacctgcctctgctgcagagagaactgctccactgcgccagactggccaagcagaaccctgctcagtatctggcccagcacgagcaactgctgctggacgcctctacaacaagccctgtggatagcagcgagctgctcctggatgtgaacgagaacggcaagcggagaacccctgaccggaccaaagagaacggcttcgacagagagcctctgcacagcgagcaccccagcaaaagaccctgcacaatcagccctggccagcggtactctcccaacaacggcctgagctaccagcctaacggactgccccatcctacacctccacctccacagcactaccggctggacgatatggctatcgcccaccactaccgggacagctacagacaccctagccaccgggacctgcgggacagaaatagacctatgggcctgcacggcacccggcaagaggaaatgattgaccaccggctgaccgacagagaatgggccgaagagtggaagcacctggaccatctgctgaactgcatcatggatatggtggaaaagacccggcggagcctgaccgtgctgagaagatgtcaagaggccgatagagaggaactgaactactggatccggcggtacagcgacgccgaggatcttaagaaaggcggcggatctagcagcagccacagcagacagcagagccccgtgaatcctgatcctgtggcactggatgcccacagagaatttctgcacagacccgccagcggctacgtgccagaggaaatctggaagaaagccgaagaggccgtgaacgaagtgaagagacaggccatgaccgaactgcagaaagccgtgtctgaggccgagagaaaggcccacgatatgatcacaaccgagcgggccaagatggaaagaacagtggccgaggccaaaagacaggccgccgaagatgctctggctgtgatcaatcagcaagaggacagcagcgagtcctgctggaactgtggcagaaaggccagcgagacatgcagcggctgtaacaccgccagatattgcggcagcttctgccagcacaaggactgggagaagcaccaccacatctgcggccagacactgcaggctcagcagcaaggcgatactcctgccgtgtctagcagcgtgacccctaattctggcgccggatctcccatggatacccctccagctgccacacctagaagcacaacccctggcacacccagcaccatcgagacaacccctagatgatgatgaggactagtccctgttcccagagcccacttttttttctttttttgaaataaaatagcctgtctttcagatctaaaaaaaaaaaaaaaaaaaaaaaaaaaaaaaaaaaaaaaaaaaaaaaaaaaaaaaaaaaaaaaaaaaaaaaaaaaaaaaaaaaaaaaaaaaaaaaaaaaagaatt

SEQ ID NO: 1475 - RNA, 1033 nt, synthetic construct
  misc_feature 1..1033: note = Artificial____RUNX1(1-241)_RUNX1T1b(short) mRNA opt3
  source 1..1033: mol_type = other RNA
aggagagtcccgcagtcggcgtccagcggctctgcttgttcgtgtgtgtgtcgttgcaggccttattcaagcttaccatgagaatccccgtggatgccagcaccagcagaagattcacccctcctagcaccgctctgagccctggcaagatgtctgaagctctgcctctgggagcacctgatgctggtgcagctctggccggaaaactgagaagcggcgacagatccatggtggaagtgctggctgatcaccccggcgaacttgtgcggacagacagccctaatttcctgtgcagcgtgctgcctacacactggcggtgcaacaagacactgcctatcgccttcaaggtggtggctctgggagatgtgcctgatggcacactggtcacagtgatggccggcaacgacgagaattacagcgccgagctgagaaatgccaccgccgccatgaagaaccaggtggccagattcaacgacctgagattcgtgggcagaagcggcaggggcaagagctttaccctgaccatcaccgtgttcaccaatcctccacaggtggcaacctaccaccgggccatcaagatcaccgtggatggccctagagagcccagacggcacagacagaaactggacgaccagaccaagcctggcagcctgagctttagcgagagactgagcgagctggaacagctgagaagaaccgccatgcgggtgtccccacatcaccctgctcctacacctaatcctcgggccagcctgaatcacagcaccgcctttaatccccagcctcagagccagatgcaagaagtgggcttctgtcacgtggcccaagtgggactgaagctgctgggataatgatgaggactagtccctgttcccagagcccacttttttttctttttttgaaataaaatagcctgtctttcagatctaaaaaaaaaaaaaaaaaaaaaaaaaaaaaaaaaaaaaaaaaaaaaaaaaaaaaaaaaaaaaaaaaaaaaaaaaaaaaaaaaaaaaaaaaaaaaaaaaaaagaatt

SEQ ID NO: 1476 - RNA, 2737 nt, synthetic construct
  misc_feature 1..2737: note = Artificial____RUNX1(1-241)_V_RUNX1T1b(22-604) mRNA opt3
  source 1..2737: mol_type = other RNA
aggagagtcccgcagtcggcgtccagcggctctgcttgttcgtgtgtgtgtcgttgcaggccttattcaagcttaccatgagaatccccgtggatgccagcaccagcagaagattcacccctcctagcaccgctctgagccctggcaagatgtctgaagctctgcctctgggagcacctgatgctggtgcagctctggccggaaaactgagaagcggcgacagatccatggtggaagtgctggctgatcaccccggcgaacttgtgcggacagacagccctaatttcctgtgcagcgtgctgcctacacactggcggtgcaacaagacactgcctatcgccttcaaggtggtggctctgggagatgtgcctgatggcacactggtcacagtgatggccggcaacgacgagaattacagcgccgagctgagaaatgccaccgccgccatgaagaaccaggtggccagattcaacgacctgagattcgtgggcagaagcggcaggggcaagagctttaccctgaccatcaccgtgttcaccaatcctccacaggtggcaacctaccaccgggccatcaagatcaccgtggatggccctagagagcccagacggcacagacagaaactggacgaccagaccaagcctggcagcctgagctttagcgagagactgagcgagctggaacagctgagaagaaccgccatgcgggtgtccccacatcaccctgctcctacacctaatcctcgggccagcctgaatcacagcaccgcctttaatccccagcctcagagccagatgcaagtgggccctgagaaaagggtgccagccatgcctggaagccccgtggaagtgaagatccagagcagatctagccctcctaccatgcctcctctgcctccaatcaatcctggcggccctagacctgtgtccttcacacctaccgctctgtccaacggcatcaatcacagccctccaacactgaatggcgccccatctccacctcagcggttttctaatggccctgccagcagcacaagcagcgccctgacaaatcagcagctgcctgctacatgtggcgccagacagctgagcaagctgaagcggtttctgaccacactgcagcagttcggcaacgatatcagccccgagatcggcgagaaagtgcggacactggttctggccctggtcaacagcaccgtgaccatcgaagagttccactgcaagctgcaagaggccaccaactttccgctgcggcctttcgtgatcccattcctgaaggccaacctgcctctgctgcagagagagctgctgcattgcgccagagccgccaagcagacaccttctcagtatctggcccagcacgagcatctgctgctgaacacctctatcgcctctccagccgatagcagcgagctgctcatggaagtgcacggcaacggaaagaggccctctccagagcggagagaggaaaacagcttcgaccgggacacaatcgcccctgagcctccagccaagagagtgtgcacaatcagcccagctcctagacacagccccgctctgacagtgccccttatgaaccctggcggacagtttcaccccacacctccaccactccagcactacaccctggaagatatcgccaccagccacctgtaccgcgagcctaacaagatgctggaacaccgggaagtgcgcgacaggcaccattctctgggactgaacggcggctaccaggacgaactggtggatcacagactgaccgagcgcgagtgggccgatgaatggaaacacctggatcacgccctgaactgcatcatggaaatggtggaaaagacccggcggagcatggccgtcctgagaagatgtcaagagagcgacagagaggaactgaactactggaagcggaggtacaacgagaacaccgagctgcggaaaaccggcactgagctggtgtccagacagcactctcctggctctgccgatagcctgagcaacgactcccagagagagttcaacagcagacccggcacaggctacgtgcccgtggaattttggaagaaaaccgaagaggccgtgaacaaagtcaagattcaggccatgagcgaggtgcagaaagccgtggctgaggccgaacagaaagccttcgaagtgatcgccaccgagcgggccagaatggaacagacaatcgccgacgtgaagagacaggccgccgaggatgccttcctggtcatcaacgagcaagaggaaagcaccgagaactgctggaactgcggcagaaaggccagcgagacatgcagcggctgcaatatcgccagatattgcggcagcttctgccagcacaaggactgggagagacaccacagactgtgcggccagaatctgcacggacagagccctcatggacagggcagacctctgctccctgttggcagaggatctagcgccagatctgccgactgtagcgtgccatctcctgcactggataagaccagcgccaccacaagcagaagcagcacaccagcctctgtgaccgccatcgataccaacggactgtgatgatgaggactagtccctgttcccagagcccacttttttttctttttttgaaataaaatagcctgtctttcagatctaaaaaaaaaaaaaaaaaaaaaaaaaaaaaaaaaaaaaaaaaaaaaaaaaaaaaaaaaaaaaaaaaaaaaaaaaaaaaaaaaaaaaaaaaaaaaaaaaaaagaatt

SEQ ID NO: 1477 - RNA, 2737 nt, synthetic construct
  misc_feature 1..2737: note = Artificial____RUNX1(1-241)_I_RUNX1T1b(22-604) mRNA opt3
  source 1..2737: mol_type = other RNA
aggagagtcccgcagtcggcgtccagcggctctgcttgttcgtgtgtgtgtcgttgcaggccttattcaagcttaccatgagaatccccgtggatgccagcaccagcagaagattcacccctcctagcaccgctctgagccctggcaagatgtctgaagctctgcctctgggagcacctgatgctggtgcagctctggccggaaaactgagaagcggcgacagatccatggtggaagtgctggctgatcaccccggcgaacttgtgcggacagacagccctaatttcctgtgcagcgtgctgcctacacactggcggtgcaacaagacactgcctatcgccttcaaggtggtggctctgggagatgtgcctgatggcacactggtcacagtgatggccggcaacgacgagaattacagcgccgagctgagaaatgccaccgccgccatgaagaaccaggtggccagattcaacgacctgagattcgtgggcagaagcggcaggggcaagagctttaccctgaccatcaccgtgttcaccaatcctccacaggtggcaacctaccaccgggccatcaagatcaccgtggatggccctagagagcccagacggcacagacagaaactggacgaccagaccaagcctggcagcctgagctttagcgagagactgagcgagctggaacagctgagaagaaccgccatgcgggtgtccccacatcaccctgctcctacacctaatcctcgggccagcctgaatcacagcaccgcctttaatccccagcctcagagccagatgcagatcggccctgagaaaagggtgccagccatgcctggaagccccgtggaagtgaagatccagagcagatctagccctcctaccatgcctcctctgcctccaatcaatcctggcggccctagacctgtgtccttcacacctaccgctctgtccaacggcatcaatcacagccctccaacactgaatggcgccccatctccacctcagcggttttctaatggccctgccagcagcacaagcagcgccctgacaaatcagcagctgcctgctacatgtggcgccagacagctgagcaagctgaagcggtttctgaccacactgcagcagttcggcaacgatatcagccccgagatcggcgagaaagtgcggacactggttctggccctggtcaacagcaccgtgaccatcgaagagttccactgcaagctgcaagaggccaccaactttccgctgcggcctttcgtgatcccattcctgaaggccaacctgcctctgctgcagagagagctgctgcattgcgccagagccgccaagcagacaccttctcagtatctggcccagcacgagcatctgctgctgaacacctctatcgcctctccagccgatagcagcgagctgctcatggaagtgcacggcaacggaaagaggccctctccagagcggagagaggaaaacagcttcgaccgggacacaatcgcccctgagcctccagccaagagagtgtgcacaatcagcccagctcctagacacagccccgctctgacagtgccccttatgaaccctggcggacagtttcaccccacacctccaccactccagcactacaccctggaagatatcgccaccagccacctgtaccgcgagcctaacaagatgctggaacaccgggaagtgcgcgacaggcaccattctctgggactgaacggcggctaccaggacgaactggtggatcacagactgaccgagcgcgagtgggccgatgaatggaaacacctggatcacgccctgaactgcatcatggaaatggtggaaaagacccggcggagcatggccgtcctgagaagatgtcaagagagcgacagagaggaactgaactactggaagcggaggtacaacgagaacaccgagctgcggaaaaccggcactgagctggtgtccagacagcactctcctggctctgccgatagcctgagcaacgactcccagagagagttcaacagcagacccggcacaggctacgtgcccgtggaattttggaagaaaaccgaagaggccgtgaacaaagtcaagattcaggccatgagcgaggtgcagaaagccgtggctgaggccgaacagaaagccttcgaagtgatcgccaccgagcgggccagaatggaacagacaatcgccgacgtgaagagacaggccgccgaggatgccttcctggtcatcaacgagcaagaggaaagcaccgagaactgctggaactgcggcagaaaggccagcgagacatgcagcggctgcaatatcgccagatattgcggcagcttctgccagcacaaggactgggagagacaccacagactgtgcggccagaatctgcacggacagagccctcatggacagggcagacctctgctccctgttggcagaggatctagcgccagatctgccgactgtagcgtgccatctcctgcactggataagaccagcgccaccacaagcagaagcagcacaccagcctctgtgaccgccatcgataccaacggactgtgatgatgaggactagtccctgttcccagagcccacttttttttctttttttgaaataaaatagcctgtctttcagatctaaaaaaaaaaaaaaaaaaaaaaaaaaaaaaaaaaaaaaaaaaaaaaaaaaaaaaaaaaaaaaaaaaaaaaaaaaaaaaaaaaaaaaaaaaaaaaaaaaaagaatt

SEQ ID NO: 1478 - RNA, 1621 nt, synthetic construct
  misc_feature 1..1621: note = Homo sapiens__Q01196-1__RUNX1(K83E_R174Q) mRNA opt3
  source 1..1621: mol_type = other RNA
aggagagtcccgcagtcggcgtccagcggctctgcttgttcgtgtgtgtgtcgttgcaggccttattcaagcttaccatgagaatccccgtggacgccagcacctccaggcggttcacacctccatctactgctctgtcaccgggcaagatgagtgaggcactcccccttggggcccctgatgcgggagctgccctggcaggtaaattgcgcagcggcgaccgatccatggtcgaagttttagccgatcacccaggggagctggtgcgtacggactctcccaactttctatgctcggtactccctacccattggagatgtaatgaaacactgccaattgctttcaaggtggtcgcacttggagatgtgcccgacggcactctggttaccgtgatggccggtaacgatgagaattactcagctgaattgaggaacgccacagcggcaatgaaaaatcaggtcgcccggtttaacgacctccgcttcgtggggagaagcggaaggggcaagagttttaccctgactataacagtattcaccaatcctccacaagttgctacgtatcaccgggccatcaaaattactgtggatggcccgcaggagccccgccgacatagacagaagctggacgatcagaccaagcctgggtccctctcttttagcgagaggttatccgaactggagcaacttcggcgtacagcaatgcgcgtctcaccacaccatcccgctcctactccaaaccccagagccagtttgaatcacagcaccgcgttcaacccgcagcctcagtctcagatgcaagacacaaggcagatccagccctccccaccttggtcatacgatcagagctatcaatacctgggaagtattgcctctccctccgtgcacccagcaacccccatcagccctggtcgggcttcgggcatgacgactctatctgccgaactctcctcacgactgagtacagctccagaccttaccgcctttagcgacccgcgccagttccccgcactgccttccatatctgatccaagaatgcattatcccggggcctttacttacagccctacaccagtgacctcaggaatcggcattggtatgagtgctatggggtccgcgacgaggtatcacacctacttgcccccgccttacccaggaagctctcaggcacaaggcggccccttccaggcctcaagtcctagctatcatctctactatggggcttccgccggatcttaccagttttcgatggtcggtggcgagcggagcccaccccgcatcctgcctccctgcacaaatgcatccactgggtcagccttactgaacccaagtctcccgaatcagtctgacgttgtggaggctgaaggaagccactccaactcacctaccaatatggcccccagcgcaagacttgaggaagcggtatggaggccatattgatgatgaggactagtccctgttcccagagcccacttttttttctttttttgaaataaaatagcctgtctttcagatctaaaaaaaaaaaaaaaaaaaaaaaaaaaaaaaaaaaaaaaaaaaaaaaaaaaaaaaaaaaaaaaaaaaaaaaaaaaaaaaaaaaaaaaaaaaaaaaaaaaagaatt

SEQ ID NO: 1479 - RNA, 2095 nt, synthetic construct
  misc_feature 1..2095: note = Homo sapiens____CBFbeta(1-165)_SMMHC(1527-1972) mRNA opt3
  source 1..2095: mol_type = other RNA
aggagagtcccgcagtcggcgtccagcggctctgcttgttcgtgtgtgtgtcgttgcaggccttattcaagcttaccatgcccagagtggtccctgaccagaggagcaagttcgagaacgaagagtttttccggaaactgtcccgcgaatgcgagatcaagtacaccggctttcgagatcgtccacacgaagagagacaagccaggttccagaatgcttgtcgggacgggcgctctgagattgcatttgttgccacaggaactaacctctcacttcagttctttccggcgagttggcagggtgaacaaagacagacgcccagcagggagtatgtggatctggaacgggaggctggcaaagtatacttgaaggcccctatgatattaaatggggtgtgcgtcatctggaaaggatggattgacctgcagcgcctagatggcatgggttgtctcgagttcgacgaggaacgagcacagcaagaagatgccctggctcagcaggcatttgaggaagccagaaggcggacccgtgagttcgaggaccgcgatagatcccatagggaagagatggaagtgcacgagcttgaaaagtctaagcgggctctggagacacagatggaggaaatgaaaactcaattggaggaactcgaggacgaactgcaggccaccgaggatgcgaagctgcgactcgaggttaacatgcaggcattaaaagggcaatttgaacgcgacctgcaggccagagatgagcagaatgaagagaagaggcggcagcttcaacgccagttgcatgagtatgaaacagagctggaagacgagagaaaacagagggctctagccgcagctgccaagaagaaactcgaaggagacctgaaggatcttgagctgcaggcggactcggccatcaaaggccgtgaggaagcaattaagcaattgcggaaactccaggctcagatgaaggatttccagcgagagctggaagacgccagagcttcaagggatgagatctttgccaccgcaaaagaaaacgagaagaaggccaagagcttagaggctgacctgatgcaactccaggaagatcttgcggcagccgagcgcgctcggaagcaggccgacctggaaaaagaggaattggcagaggagctagccagttccctgtctggcagaaatgctctccaggatgaaaagaggcgcctggaggcccgaatagcacaacttgaagaggagctggaagaggaacaggggaacatggaggcgatgagcgaccgggtgcgtaaagctactcagcaagccgaacagttgtccaatgagctcgcaacagagagatcaaccgcccagaagaacgaaagtgctaggcagcaactggagcgccagaataaggaattacggagcaaactgcacgagatggaaggagccgtcaagtctaaattcaagtccacgatcgcagctctagaggccaaaattgcgcagctcgaggaacaggtggagcaagaagccagagagaagcaggctgcaactaagtcactgaaacagaaggataaaaagttgaaagaaatccttctgcaggtagaggacgagaggaagatggccgaacaatacaaggagcaggctgaaaaaggtaacgcccgagttaagcagctcaaacgccaactggaggaggcagaagaggaaagccagcggattaatgcgaacagaaggaaacttcagcgtgagctggacgaagccaccgagagtaatgaggctatgggccgcgaagtgaacgccttgaaatctaagctccggagagggaacgagacatccttcgtcccaagcaggcgatcgggaggccggcgcgtgatcgaaaatgcagatggttctgaggaagagactgacaccagagatgctgactttaacgggacaaaagcctccgagtgatgatgaggactagtccctgttcccagagcccacttttttttctttttttgaaataaaatagcctgtctttcagatctaaaaaaaaaaaaaaaaaaaaaaaaaaaaaaaaaaaaaaaaaaaaaaaaaaaaaaaaaaaaaaaaaaaaaaaaaaaaaaaaaaaaaaaaaaaaaaaaaaaagaatt

SEQ ID NO: 1480 - RNA, 1810 nt, synthetic construct
  misc_feature 1..1810: note = Artificial____CBFbeta(1-165)_SMMHC(1527-1877) mRNA opt3
  source 1..1810: mol_type = other RNA
aggagagtcccgcagtcggcgtccagcggctctgcttgttcgtgtgtgtgtcgttgcaggccttattcaagcttaccatgcccagagtggtccctgaccagaggagcaagttcgagaacgaagagtttttccggaaactgtcccgcgaatgcgagatcaagtacaccggctttcgagatcgtccacacgaagagagacaagccaggttccagaatgcttgtcgggacgggcgctctgagattgcatttgttgccacaggaactaacctctcacttcagttctttccggcgagttggcagggtgaacaaagacagacgcccagcagggagtatgtggatctggaacgggaggctggcaaagtatacttgaaggcccctatgatattaaatggggtgtgcgtcatctggaaaggatggattgacctgcagcgcctagatggcatgggttgtctcgagttcgacgaggaacgagcacagcaagaagatgccctggctcagcaggcatttgaggaagccagaaggcggacccgtgagttcgaggaccgcgatagatcccatagggaagagatggaagtgcacgagcttgaaaagtctaagcgggctctggagacacagatggaggaaatgaaaactcaattggaggaactcgaggacgaactgcaggccaccgaggatgcgaagctgcgactcgaggttaacatgcaggcattaaaagggcaatttgaacgcgacctgcaggccagagatgagcagaatgaagagaagaggcggcagcttcaacgccagttgcatgagtatgaaacagagctggaagacgagagaaaacagagggctctagccgcagctgccaagaagaaactcgaaggagacctgaaggatcttgagctgcaggcggactcggccatcaaaggccgtgaggaagcaattaagcaattgcggaaactccaggctcagatgaaggatttccagcgagagctggaagacgccagagcttcaagggatgagatctttgccaccgcaaaagaaaacgagaagaaggccaaaagccttgaggctgacctgatgcaactccaggaagatcttgcggcagccgagcgcgctcggaagcaggccgacctggaaaaagaggaattggcagaggagctagccagttccctgtctggcagaaatgctctccaggatgaaaagaggcgcctggaggcccgaatagcacaacttgaagaggagctggaagaggaacaggggaacatggaggcgatgagcgaccgggtgcgtaaagctactcagcaagccgaacagttgtccaatgagctcgcaacagagagatcaaccgcccagaagaacgaaagtgctaggcagcaactggagcgccagaataaggaattacggagcaaactgcacgagatggaaggagccgtcaagtctaaattcaagtccacgatcgcagctctagaggccaaaattgcgcagctcgaggaacaggtggagcaagaagccagagagaagcaggctgcaactaagtcactgaaacagaaggataaaaagttaaaagaaatcttgctgcaggtagaggacgagaggaagatggccgaacaatacaaggagcaggctgaaaaaggtaacgcctgatgatgaggactagtccctgttcccagagcccacttttttttctttttttgaaataaaatagcctgtctttcagatctaaaaaaaaaaaaaaaaaaaaaaaaaaaaaaaaaaaaaaaaaaaaaaaaaaaaaaaaaaaaaaaaaaaaaaaaaaaaaaaaaaaaaaaaaaaaaaaaaaaagaatt

SEQ ID NO: 1481 - RNA, 871 nt, synthetic construct
  misc_feature 1..871: note = Artificial____CBFbeta(1-165)_Linker_Lifeact mRNA opt3
  source 1..871: mol_type = other RNA
aggagagtcccgcagtcggcgtccagcggctctgcttgttcgtgtgtgtgtcgttgcaggccttattcaagcttaccatgcccagagtggtccctgaccagaggagcaagttcgagaacgaagagtttttccggaaactgtcccgcgaatgcgagatcaagtacaccggctttcgagatcgtccacacgaagagagacaagccaggttccagaatgcttgtcgggacgggcgctctgagattgcatttgttgccacaggaactaacctctcacttcagttctttccggcgagttggcagggtgaacaaagacagacgcccagcagggagtatgtggatctggaacgggaggctggcaaagtatacttgaaggcccctatgatattaaatggggtgtgcgtcatctggaaaggatggattgacctgcagcgcctagatggcatgggttgtctcgagttcgacgaggaacgagcacagcaagaagatgccctggctcagcaggcatttgaggaagccagaaggcggacccgtgagttcgaggaccgcgatagatcccatagggaagagatggaagggggatctggcggctcagggggatcgggtggcagcgggggaggcggtgtggctgaccttatcaagaagtttgagagtatttccaaagaagagggggatccacccgttgccacatgatgatgaggactagtccctgttcccagagcccacttttttttctttttttgaaataaaatagcctgtctttcagatctaaaaaaaaaaaaaaaaaaaaaaaaaaaaaaaaaaaaaaaaaaaaaaaaaaaaaaaaaaaaaaaaaaaaaaaaaaaaaaaaaaaaaaaaaaaaaaaaaaaagaatt

SEQ ID NO: 1482 - RNA, 838 nt, synthetic construct
  misc_feature 1..838: note = Artificial____CBFbeta(1-165)_HIF1alpha(549-575) mRNA opt3
  source 1..838: mol_type = other RNA
aggagagtcccgcagtcggcgtccagcggctctgcttgttcgtgtgtgtgtcgttgcaggccttattcaagcttaccatgcccagagtggtccctgaccagaggagcaagttcgagaacgaagagtttttccggaaactgtcccgcgaatgcgagatcaagtacaccggctttcgagatcgtccacacgaagagagacaagccaggttccagaatgcttgtcgggacgggcgctctgagattgcatttgttgccacaggaactaacctctcacttcagttctttccggcgagttggcagggtgaacaaagacagacgcccagcagggagtatgtggatctggaacgggaggctggcaaagtatacttgaaggcccctatgatattaaatggggtgtgcgtcatctggaaaggatggattgacctgcagcgcctagatggcatgggttgtctcgagttcgacgaggaacgagcacagcaagaagatgccctggctcagcaggcatttgaggaagccagaaggcggacccgtgagttcgaggaccgcgatagatcccatagggaagagatggaaccattttctacacaggacactgatcttgacctggagatgttggctccctatatccctatggatgacgacttccaactccggtgatgatgaggactagtccctgttcccagagcccacttttttttctttttttgaaataaaatagcctgtctttcagatctaaaaaaaaaaaaaaaaaaaaaaaaaaaaaaaaaaaaaaaaaaaaaaaaaaaaaaaaaaaaaaaaaaaaaaaaaaaaaaaaaaaaaaaaaaaaaaaaaaaagaatt

SEQ ID NO: 1483 - RNA, 883 nt, synthetic construct
  misc_feature 1..883: note Artificial____CBFbeta(1-165)_Linker_HIF1alpha(549-575) mRNA opt3
  source 1..883: mol_type = other RNA
aggagagtcccgcagtcggcgtccagcggctctgcttgttcgtgtgtgtgtcgttgcaggccttattcaagcttaccatgcccagagtggtccctgaccagaggagcaagttcgagaacgaagagtttttccggaaactgtcccgcgaatgcgagatcaagtacaccggctttcgagatcgtccacacgaagagagacaagccaggttccagaatgcttgtcgggacgggcgctctgagattgcatttgttgccacaggaactaacctctcacttcagttctttccggcgagttggcagggtgaacaaagacagacgcccagcagggagtatgtggatctggaacgggaggctggcaaagtatacttgaaggcccctatgatattaaatggggtgtgcgtcatctggaaaggatggattgacctgcagcgcctagatggcatgggttgtctcgagttcgacgaggaacgagcacagcaagaagatgccctggctcagcaggcatttgaggaagccagaaggcggacccgtgagttcgaggaccgcgatagatcccatagggaagagatggaagggggatctggcggctcagggggatcgggtggcagcgggggaggcccatttagtacacaggacactgatcttgacctggagatgttggctccctatatccctatggatgacgacttccaactccggtgatgatgaggactagtccctgttcccagagcccacttttttttctttttttgaaataaaatagcctgtctttcagatctaaaaaaaaaaaaaaaaaaaaaaaaaaaaaaaaaaaaaaaaaaaaaaaaaaaaaaaaaaaaaaaaaaaaaaaaaaaaaaaaaaaaaaaaaaaaaaaaaaaagaatt

SEQ ID NO: 1484 - RNA, 2518 nt, synthetic construct
  misc_feature 1..2518: note = Artificial____RUNX1(1-177)_N_RUNX1T1a(31-604) mRNA opt3
  source 1..2518: mol_type = other RNA
aggagagtcccgcagtcggcgtccagcggctctgcttgttcgtgtgtgtgtcgttgcaggccttattcaagcttaccatgagaatccccgtggacgccagcacctccaggcggttcacacctccatctactgctctgtcaccgggcaagatgagtgaggcactcccccttggggcccctgatgcgggagctgccctggcaggtaaattgcgcagcggcgaccgatccatggtcgaagttttagccgatcacccaggggagctggtgcgtacggactctcccaactttctatgctcggtactccctacccattggagatgtaataagacactgccaattgctttcaaagtggtcgcacttggagatgtgcccgacggcactctggttaccgtgatggccggtaacgatgaaaattactcagctgagttgaggaacgccacagcggcaatgaagaatcaggtcgcccggtttaacgacctccgcttcgtggggagaagcggaaggggcaaaagttttaccctgactataacagtattcaccaatcctccacaagttgctacgtatcaccgggccatcaagattactgtggatggcccgcgcgaaccccgaaacagaaccgagaagcattccacaatgcctgactctccagtcgatgtgaaaactcagagcaggctgacaccccctaccatgccacccccgcctaccacgcagggggcaccccggacttcctcatttacaccaaccactctcacaaatggaaccagtcacagccctacggctttaaacggtgccccctctccacccaatggcttctccaacgggccttcaagcagttcttccagctcgctggcgaatcagcaacttccaccggcctgcggagcacgtcagttgtctaagctgaaacgctttctaaccacactccagcagttcggcaacgacatctcccccgagattggtgaaagagtgaggactctggtccttgggctggttaattcaaccttgacaatcgaggaatttcatagtaagctccaagaggctactaacttccctctgcggccatttgtgatacccttcttaaaagccaacctgcctctccttcagcgagagctgttgcactgtgctcgcctagccaagcagaatccagcacagtacctggcccaacacgaacagctcctgcttgatgctagcaccacatcccccgtagactctagcgagctgttgctcgacgtgaacgaaaatggaaagagaaggaccccggatcggactaaagagaacggcttcgaccgcgaacctctgcattcagagcacccaagtaagagaccctgcacgatctcccctggccagaggtatagccccaataacgggttatcttaccaaccaaatggactgcctcatcccacaccaccgcctccccagcactatcgtctagatgacatggcgattgcacaccattaccgggattcatatcgacacccaagtcatagagacctcagggatcgcaaccggcccatgggtctgcacggcaccagacaggaggaaatgatcgaccataggcttactgatcgcgagtgggccgaagagtggaaacacttggaccatctgctcaattgtattatggatatggtcgaaaagacccgacggagcctgacagtgcttcgtagatgccaggaggctgacagggaggaactgaactactggatccgccggtactccgacgccgaggatttgaaaaagggcggagggtcttcgagctcccactcaagacaacagagtcctgttaatccagaccccgtggcactcgatgcccacagggaatttctgcatcgacctgcttctggttatgtcccggaggaaatatggaaaaaggccgaggaggcagtgaacgaagtaaagcgccaggcgatgaccgagttacagaaagctgttagcgaagccgagcggaaggcacacgacatgattactacagagagagccaaaatggaaaggacggtggctgaggccaagcgtcaagcagctgaagatgccctggcggtcatcaatcagcaggaggactcctcagaaagctgttggaactgcgggcgcaaagcctctgagacctgttccggctgcaatactgctcggtactgtggaagtttctgccagcacaaggattgggagaagcatcaccatatttgcggccaaacactacaggcacagcagcaaggggacaccccagccgtgtctagctccgtcacacccaactcaggagctggtagtcctatggatactccacccgccgcaacccctagaagcacgaccccgggcacaccctcgactatcgaaaccacaccaaggtgatgatgaggactagtccctgttcccagagcccacttttttttctttttttgaaataaaatagcctgtctttcagatctaaaaaaaaaaaaaaaaaaaaaaaaaaaaaaaaaaaaaaaaaaaaaaaaaaaaaaaaaaaaaaaaaaaaaaaaaaaaaaaaaaaaaaaaaaaaaaaaaaaagaatt

SEQ ID NO: 1485 - RNA, 1033 nt, synthetic construct
  misc_feature 1..1033: note = Artificial____RUNX1(1-241)_RUNX1T1b(short) mRNA opt3
  source 1..1033: mol_type = other RNA
aggagagtcccgcagtcggcgtccagcggctctgcttgttcgtgtgtgtgtcgttgcaggccttattcaagcttaccatgagaatccccgtggacgccagcacctccaggcggttcacacctccatctactgctctgtcaccgggcaagatgagtgaggcactcccccttggggcccctgatgcgggagctgccctggcaggtaaattgcgcagcggcgaccgatccatggtcgaagttttagccgatcacccaggggagctggtgcgtacggactctcccaactttctatgctcggtactccctacccattggagatgtaataagacactgccaattgctttcaaagtggtcgcacttggagatgtgcccgacggcactctggttaccgtgatggccggtaacgatgaaaattactcagctgagttgaggaacgccacagcggcaatgaagaatcaggtcgcccggtttaacgacctccgcttcgtggggagaagcggaaggggcaaaagttttaccctgactataacagtattcaccaatcctccacaagttgctacgtatcaccgggccatcaagattactgtggatggcccgcgcgaaccccgaagacataggcagaagctggacgatcagaccaaacctgggtccctctcttttagcgagcggttatccgagctggaacagcttcgtcgcacagcaatgagagtctcaccacaccatcccgctcctactccaaaccccagggccagtttgaatcacagcaccgcgttcaacccgcaacctcagtctcagatgcaggaggtgggattttgccacgtggcccaagtcggtctgaagctactcggctgatgatgaggactagtccctgttcccagagcccacttttttttctttttttgaaataaaatagcctgtctttcagatctaaaaaaaaaaaaaaaaaaaaaaaaaaaaaaaaaaaaaaaaaaaaaaaaaaaaaaaaaaaaaaaaaaaaaaaaaaaaaaaaaaaaaaaaaaaaaaaaaaaagaatt

SEQ ID NO: 1486 - RNA, 2737 nt, synthetic construct
  misc_feature 1..2737: note = Artificial____RUNX1(1-241)_V_RUNX1T1b(22-604) mRNA opt3
  source 1..2737: mol_type = other RNA
aggagagtcccgcagtcggcgtccagcggctctgcttgttcgtgtgtgtgtcgttgcaggccttattcaagcttaccatgagaatccccgtggacgccagcacctccaggcggttcacacctccatctactgctctgtcaccgggcaagatgagtgaggcactcccccttggggcccctgatgcgggagctgccctggcaggtaaattgcgcagcggcgaccgatccatggtcgaagttttagccgatcacccaggggagctggtgcgtacggactctcccaactttctatgctcggtactccctacccattggagatgtaataagacactgccaattgctttcaaagtggtcgcacttggagatgtgcccgacggcactctggttaccgtgatggccggtaacgatgaaaattactcagctgagttgaggaacgccacagcggcaatgaagaatcaggtcgcccggtttaacgacctccgcttcgtggggagaagcggaaggggcaaaagttttaccctgactataacagtattcaccaatcctccacaagttgctacgtatcaccgggccatcaagattactgtggatggcccgcgcgaaccccgaagacataggcagaagctggacgatcagaccaaacctgggtccctctcttttagcgagcggttatccgagctggaacagcttcgtcgcacagcaatgagagtctcaccacaccatcccgctcctactccaaaccccagggccagtttgaatcacagcaccgcgttcaacccgcaacctcagtctcagatgcaagtgggacccgagaagcgggtgccagccatgcctggttcccccgtcgaagttaaaatccagtcacgaagcagtccacccacaatgcctccactgccgcccattaatcctggcgggccacgccccgtgtcttttacccctacggcactatccaacggaatcaatcacagcccacccactctcaacggcgctccgtcgcctccacagagattctctaatggtcccgcctcctcaacaagtagcgctctgaccaaccagcagcttcctgccacttgcggggcaaggcaactgtccaagttgaaacggtttctcacaaccctgcagcagttcggaaacgacatatctcccgagatcggcgagaaggtacgcacgttagtgctggccctcgtcaatagcaccgtgacaattgaagagtttcattgtaagctacaagaagctactaacttcccactgagacctttcgttatcccctttttgaaagcgaatctaccactgctccagagggagctgcttcactgcgcacgtgccgctaagcagaccccgtcacagtacctggcccaacatgaacacttgctcctgaacacaagtattgcatcccctgccgatagctctgagttactgatggaggtgcacggcaatgggaaacggccctcaccagaacgaagagaggaaaacagtttcgacagggacactatcgctcccgagcctccagccaagcgcgtctgtaccataagccccgcacctcggcattccccggcgctaacagtgccactcatgaatcccggaggtcagtttcaccctaccccaccccctctgcagcattatactcttgaagatattgctacgtctcacttgtacagagagccgaacaaaatgctggagcatagggaagtacgcgaccgacaccactcgctcggcctgaatgggggatatcaggatgagcttgttgaccatcggctgacagaacgtgagtgggccgatgaatggaagcacttggaccatgcactcaactgcatcatggagatggtggagaaaaccagaaggagcatggccgtcctgcgccggtgtcaagaatccgatagagaggaattaaattactggaagaggcgatataacgagaatactgagctgcgcaagaccggcacagaacttgtgtcacggcagcacagtcccggttctgctgacagcctctccaacgattcacagagagagttcaatagcaggccagggaccggctacgtccctgtggaattttggaaaaagactgaggaagccgttaacaaagtgaagattcaggcaatgtctgaggtacaaaaagctgtcgccgaggcggaacagaaggccttcgaggtgatcgctacagaacgtgcacgcatggagcagacgatcgccgacgttaagcggcaggctgccgaagatgcatttctggtgattaacgagcaagaggaatccaccgagaattgctggaactgtggaagaaaagcgagtgaaacttgcagcggctgtaatatagccaggtactgcgggtctttctgccagcacaaggactgggagcgacatcaccggctttgtggacagaacttgcatggtcaatcaccccacggccaggggcgcccactgctccctgtcggaagaggctccagtgctaggagcgccgactgctcggtgccctccccagcactggataaaacatctgctaccacaagccggtcaagtactccggcctccgtaaccgcaatcgacacgaatggtttatgatgatgaggactagtccctgttcccagagcccacttttttttctttttttgaaataaaatagcctgtctttcagatctaaaaaaaaaaaaaaaaaaaaaaaaaaaaaaaaaaaaaaaaaaaaaaaaaaaaaaaaaaaaaaaaaaaaaaaaaaaaaaaaaaaaaaaaaaaaaaaaaaaagaatt

SEQ ID NO: 1487 - RNA, 2737 nt, synthetic construct
  misc_feature 1..2737: note = Artificial____RUNX1(1-241)_I_RUNX1T1b(22-604) mRNA opt3
  source 1..2737: mol_type = other RNA
aggagagtcccgcagtcggcgtccagcggctctgcttgttcgtgtgtgtgtcgttgcaggccttattcaagcttaccatgagaatccccgtggacgccagcacctccaggcggttcacacctccatctactgctctgtcaccgggcaagatgagtgaggcactcccccttggggcccctgatgcgggagctgccctggcaggtaaattgcgcagcggcgaccgatccatggtcgaagttttagccgatcacccaggggagctggtgcgtacggactctcccaactttctatgctcggtactccctacccattggagatgtaataagacactgccaattgctttcaaagtggtcgcacttggagatgtgcccgacggcactctggttaccgtgatggccggtaacgatgaaaattactcagctgagttgaggaacgccacagcggcaatgaagaatcaggtcgcccggtttaacgacctccgcttcgtggggagaagcggaaggggcaaaagttttaccctgactataacagtattcaccaatcctccacaagttgctacgtatcaccgggccatcaagattactgtggatggcccgcgcgaaccccgaagacataggcagaagctggacgatcagaccaaacctgggtccctctcttttagcgagcggttatccgagctggaacagcttcgtcgcacagcaatgagagtctcaccacaccatcccgctcctactccaaaccccagggccagtttgaatcacagcaccgcgttcaacccgcaacctcagtctcagatgcagatcggacccgagaagcgggtgccagccatgcctggttcccccgtggaagtcaaaattcaatcacgaagcagtccacccacaatgcctccactgccgcccatcaatcctggcgggccacgccccgtttcttttacccctacggcactatccaacggaataaatcacagcccacccactctcaacggcgctccgtcgcctccacagagattctctaatggtcccgcctcctcaacaagtagcgctctgaccaaccagcagcttcctgccacttgcggggcaaggcaactgtccaagttgaaacggtttctcacaaccctgcagcagttcggaaacgacatctctcccgagattggcgagaaggtgcgcacgttagtactggccctcgtgaatagcaccgtcacaatcgaagagtttcattgtaagctacaagaagctactaacttcccactgagacctttcgtgattccctttttgaaagcgaatctaccactgctccagagggagctgcttcactgcgcacgtgccgctaagcagaccccgtcacagtacctggcccaacatgaacacttgctcctgaacacaagtatcgcatcccctgccgatagctctgagttactgatggaggttcacggcaatgggaaacggccctcaccagaacgaagagaggaaaacagtttcgacagggacactatagctcccgagcctccagccaagcgcgtgtgtaccattagccccgcacctcggcattccccggcgctaacagtcccactcatgaatcccggaggtcagtttcaccctaccccaccccctctgcagcattatactcttgaagatatcgctacgtctcacttgtacagagagccgaacaaaatgctggagcatagggaagtgcgcgaccgacaccactcgctcggcctgaatgggggatatcaggatgagcttgtagaccatcggctgacagaacgtgagtgggccgatgaatggaagcacttggaccatgcactcaactgcattatggagatggttgagaaaaccagaaggagcatggccgtgctgcgccggtgtcaagaatccgatagagaggaattaaattactggaagaggcgatataacgagaatactgagctgcgcaagaccggcacagaacttgtctcacggcagcacagtcccggttctgctgacagcctctccaacgattcacagagagagttcaatagcaggccagggaccggctacgtgcctgtcgaattttggaaaaagactgaggaagccgtgaacaaagttaagatccaggcaatgtctgaggtgcaaaaagctgtagccgaggcggaacagaaggccttcgaggtcatcgctacagaacgtgcacgcatggagcagacgattgccgacgtgaagcggcaggctgccgaagatgcatttctggttataaacgagcaagaggaatccaccgagaattgctggaactgtggaagaaaagcgagtgaaacttgcagcggctgtaatatcgccaggtactgcgggtctttctgccagcacaaggactgggagcgacatcaccggctttgtggacagaacttgcatggtcaatcaccccacggccaggggcgcccactgctccctgtgggaagaggctccagtgctaggagcgccgactgctcggtcccctccccagcactggataaaacatctgctaccacaagccggtcaagtactccggcctccgtgaccgcaattgacacgaatggtttatgatgatgaggactagtccctgttcccagagcccacttttttttctttttttgaaataaaatagcctgtctttcagatctaaaaaaaaaaaaaaaaaaaaaaaaaaaaaaaaaaaaaaaaaaaaaaaaaaaaaaaaaaaaaaaaaaaaaaaaaaaaaaaaaaaaaaaaaaaaaaaaaaaagaatt

SEQ ID NO: 1488 - RNA, 1621 nt, synthetic construct
  misc_feature 1..1621: note = Homo sapiens__Q01196-1__RUNX1(K83E_R174Q) mRNA opt4
  source 1..1621: mol_type = other RNA
aggagagtcccgcagtcggcgtccagcggctctgcttgttcgtgtgtgtgtcgttgcaggccttattcaagcttaccatgagaatccccgtggacgccagcaccagcagaagattcaccccccccagcaccgccctgagccccggcaagatgagcgaggccctgcccctgggcgcccccgacgccggcgccgccctggccggcaagctgagaagcggcgacagaagcatggtggaggtgctggccgaccaccccggcgagctggtgagaaccgacagccccaacttcctgtgcagcgtgctgcccacccactggagatgcaacgagaccctgcccatcgccttcaaggtggtggccctgggcgacgtgcccgacggcaccctggtgaccgtgatggccggcaacgacgagaactacagcgccgagctgagaaacgccaccgccgccatgaagaaccaggtggccagattcaacgacctgagattcgtgggcagaagcggcagaggcaagagcttcaccctgaccatcaccgtgttcaccaaccccccccaggtggccacctaccacagagccatcaagatcaccgtggacggcccccaggagcccagaagacacagacagaagctggacgaccagaccaagcccggcagcctgagcttcagcgagagactgagcgagctggagcagctgagaagaaccgccatgagagtgagcccccaccaccccgcccccacccccaaccccagagccagcctgaaccacagcaccgccttcaacccccagccccagagccagatgcaggacaccagacagatccagcccagccccccctggagctacgaccagagctaccagtacctgggcagcatcgccagccccagcgtgcaccccgccacccccatcagccccggcagagccagcggcatgaccaccctgagcgccgagctgagcagcagactgagcaccgcccccgacctgaccgccttcagcgaccccagacagttccccgccctgcccagcatcagcgaccccagaatgcactaccccggcgccttcacctacagccccacccccgtgaccagcggcatcggcatcggcatgagcgccatgggcagcgccaccagataccacacctacctgccccccccctaccccggcagcagccaggcccagggcggccccttccaggccagcagccccagctaccacctgtactacggcgccagcgccggcagctaccagttcagcatggtgggcggcgagagaagcccccccagaatcctgcccccctgcaccaacgccagcaccggcagcgccctgctgaaccccagcctgcccaaccagagcgacgtggtggaggccgagggcagccacagcaacagccccaccaacatggcccccagcgccagactggaggaggccgtgtggagaccctactgatgatgaggactagtccctgttcccagagcccacttttttttctttttttgaaataaaatagcctgtctttcagatctaaaaaaaaaaaaaaaaaaaaaaaaaaaaaaaaaaaaaaaaaaaaaaaaaaaaaaaaaaaaaaaaaaaaaaaaaaaaaaaaaaaaaaaaaaaaaaaaaaaagaatt

SEQ ID NO: 1489 - RNA, 2095 nt, synthetic construct
  misc_feature 1..2095: note = Homo sapiens____CBFbeta(1-165)_SMMHC(1527-1972) mRNA opt4
  source 1..2095: mol_type = other RNA
aggagagtcccgcagtcggcgtccagcggctctgcttgttcgtgtgtgtgtcgttgcaggccttattcaagcttaccatgcccagagtggtgcccgaccagagaagcaagttcgagaacgaggagttcttcagaaagctgagcagagagtgcgagatcaagtacaccggcttcagagacagaccccacgaggagagacaggccagattccagaacgcctgcagagacggcagaagcgagatcgccttcgtggccaccggcaccaacctgagcctgcagttcttccccgccagctggcagggcgagcagagacagacccccagcagagagtacgtggacctggagagagaggccggcaaggtgtacctgaaggcccccatgatcctgaacggcgtgtgcgtgatctggaagggctggatcgacctgcagagactggacggcatgggctgcctggagttcgacgaggagagagcccagcaggaggacgccctggcccagcaggccttcgaggaggccagaagaagaaccagagagttcgaggacagagacagaagccacagagaggagatggaggtgcacgagctggagaagagcaagagagccctggagacccagatggaggagatgaagacccagctggaggagctggaggacgagctgcaggccaccgaggacgccaagctgagactggaggtgaacatgcaggccctgaagggccagttcgagagagacctgcaggccagagacgagcagaacgaggagaagagaagacagctgcagagacagctgcacgagtacgagaccgagctggaggacgagagaaagcagagagccctggccgccgccgccaagaagaagctggagggcgacctgaaggacctggagctgcaggccgacagcgccatcaagggcagagaggaggccatcaagcagctgagaaagctgcaggcccagatgaaggacttccagagagagctggaggacgccagagccagcagagacgagatcttcgccaccgccaaggagaacgagaagaaggccaagagcctggaggccgacctgatgcagctgcaggaggacctggccgccgccgagagagccagaaagcaggccgacctggagaaggaggagctggccgaggagctggccagcagcctgagcggcagaaacgccctgcaggacgagaagagaagactggaggccagaatcgcccagctggaggaggagctggaggaggagcagggcaacatggaggccatgagcgacagagtgagaaaggccacccagcaggccgagcagctgagcaacgagctggccaccgagagaagcaccgcccagaagaacgagagcgccagacagcagctggagagacagaacaaggagctgagaagcaagctgcacgagatggagggcgccgtgaagagcaagttcaagagcaccatcgccgccctggaggccaagatcgcccagctggaggagcaggtggagcaggaggccagagagaagcaggccgccaccaagagcctgaagcagaaggacaagaagctgaaggagatcctgctgcaggtggaggacgagagaaagatggccgagcagtacaaggagcaggccgagaagggcaacgccagagtgaagcagctgaagagacagctggaggaggccgaggaggagagccagagaatcaacgccaacagaagaaagctgcagagagagctggacgaggccaccgagagcaacgaggccatgggcagagaggtgaacgccctgaagagcaagctgagaagaggcaacgagaccagcttcgtgcccagcagaagaagcggcggcagaagagtgatcgagaacgccgacggcagcgaggaggagaccgacaccagagacgccgacttcaacggcaccaaggccagcgagtgatgatgaggactagtccctgttcccagagcccacttttttttctttttttgaaataaaatagcctgtctttcagatctaaaaaaaaaaaaaaaaaaaaaaaaaaaaaaaaaaaaaaaaaaaaaaaaaaaaaaaaaaaaaaaaaaaaaaaaaaaaaaaaaaaaaaaaaaaaaaaaaaaagaatt

SEQ ID NO: 1490 - RNA, 1810 nt, synthetic construct
  misc_feature 1..1810: note = Artificial____CBFbeta(1-165)_SMMHC(1527-1877) mRNA opt4
  source 1..1810: mol_type = other RNA
aggagagtcccgcagtcggcgtccagcggctctgcttgttcgtgtgtgtgtcgttgcaggccttattcaagcttaccatgcccagagtggtgcccgaccagagaagcaagttcgagaacgaggagttcttcagaaagctgagcagagagtgcgagatcaagtacaccggcttcagagacagaccccacgaggagagacaggccagattccagaacgcctgcagagacggcagaagcgagatcgccttcgtggccaccggcaccaacctgagcctgcagttcttccccgccagctggcagggcgagcagagacagacccccagcagagagtacgtggacctggagagagaggccggcaaggtgtacctgaaggcccccatgatcctgaacggcgtgtgcgtgatctggaagggctggatcgacctgcagagactggacggcatgggctgcctggagttcgacgaggagagagcccagcaggaggacgccctggcccagcaggccttcgaggaggccagaagaagaaccagagagttcgaggacagagacagaagccacagagaggagatggaggtgcacgagctggagaagagcaagagagccctggagacccagatggaggagatgaagacccagctggaggagctggaggacgagctgcaggccaccgaggacgccaagctgagactggaggtgaacatgcaggccctgaagggccagttcgagagagacctgcaggccagagacgagcagaacgaggagaagagaagacagctgcagagacagctgcacgagtacgagaccgagctggaggacgagagaaagcagagagccctggccgccgccgccaagaagaagctggagggcgacctgaaggacctggagctgcaggccgacagcgccatcaagggcagagaggaggccatcaagcagctgagaaagctgcaggcccagatgaaggacttccagagagagctggaggacgccagagccagcagagacgagatcttcgccaccgccaaggagaacgagaagaaggccaagagcctggaggccgacctgatgcagctgcaggaggacctggccgccgccgagagagccagaaagcaggccgacctggagaaggaggagctggccgaggagctggccagcagcctgagcggcagaaacgccctgcaggacgagaagagaagactggaggccagaatcgcccagctggaggaggagctggaggaggagcagggcaacatggaggccatgagcgacagagtgagaaaggccacccagcaggccgagcagctgagcaacgagctggccaccgagagaagcaccgcccagaagaacgagagcgccagacagcagctggagagacagaacaaggagctgagaagcaagctgcacgagatggagggcgccgtgaagagcaagttcaagagcaccatcgccgccctggaggccaagatcgcccagctggaggagcaggtggagcaggaggccagagagaagcaggccgccaccaagagcctgaagcagaaggacaagaagctgaaggagatcctgctgcaggtggaggacgagagaaagatggccgagcagtacaaggagcaggccgagaagggcaacgcctgatgatgaggactagtccctgttcccagagcccacttttttttctttttttgaaataaaatagcctgtctttcagatctaaaaaaaaaaaaaaaaaaaaaaaaaaaaaaaaaaaaaaaaaaaaaaaaaaaaaaaaaaaaaaaaaaaaaaaaaaaaaaaaaaaaaaaaaaaaaaaaaaaagaatt

SEQ ID NO: 1491 - RNA, 871 nt, synthetic construct
  misc_feature 1..871: note = Artificial____CBFbeta(1-165)_Linker_Lifeact mRNA opt4
  source 1..871: mol_type = other RNA
aggagagtcccgcagtcggcgtccagcggctctgcttgttcgtgtgtgtgtcgttgcaggccttattcaagcttaccatgcccagagtggtgcccgaccagagaagcaagttcgagaacgaggagttcttcagaaagctgagcagagagtgcgagatcaagtacaccggcttcagagacagaccccacgaggagagacaggccagattccagaacgcctgcagagacggcagaagcgagatcgccttcgtggccaccggcaccaacctgagcctgcagttcttccccgccagctggcagggcgagcagagacagacccccagcagagagtacgtggacctggagagagaggccggcaaggtgtacctgaaggcccccatgatcctgaacggcgtgtgcgtgatctggaagggctggatcgacctgcagagactggacggcatgggctgcctggagttcgacgaggagagagcccagcaggaggacgccctggcccagcaggccttcgaggaggccagaagaagaaccagagagttcgaggacagagacagaagccacagagaggagatggagggcggcagcggcggcagcggcggcagcggcggcagcggcggcggcggcgtggccgacctgatcaagaagttcgagagcatcagcaaggaggagggcgacccccccgtggccacctgatgatgaggactagtccctgttcccagagcccacttttttttctttttttgaaataaaatagcctgtctttcagatctaaaaaaaaaaaaaaaaaaaaaaaaaaaaaaaaaaaaaaaaaaaaaaaaaaaaaaaaaaaaaaaaaaaaaaaaaaaaaaaaaaaaaaaaaaaaaaaaaaaagaatt

SEQ ID NO: 1492 - RNA, 838 nt, synthetic construct
  misc_feature 1..838: note = Artificial____CBFbeta(1-165)_HIF1alpha(549-575) mRNA opt4
  source 1..838: mol_type = other RNA
aggagagtcccgcagtcggcgtccagcggctctgcttgttcgtgtgtgtgtcgttgcaggccttattcaagcttaccatgcccagagtggtgcccgaccagagaagcaagttcgagaacgaggagttcttcagaaagctgagcagagagtgcgagatcaagtacaccggcttcagagacagaccccacgaggagagacaggccagattccagaacgcctgcagagacggcagaagcgagatcgccttcgtggccaccggcaccaacctgagcctgcagttcttccccgccagctggcagggcgagcagagacagacccccagcagagagtacgtggacctggagagagaggccggcaaggtgtacctgaaggcccccatgatcctgaacggcgtgtgcgtgatctggaagggctggatcgacctgcagagactggacggcatgggctgcctggagttcgacgaggagagagcccagcaggaggacgccctggcccagcaggccttcgaggaggccagaagaagaaccagagagttcgaggacagagacagaagccacagagaggagatggagcccttcagcacccaggacaccgacctggacctggagatgctggccccctacatccccatggacgacgacttccagctgagatgatgatgaggactagtccctgttcccagagcccacttttttttctttttttgaaataaaatagcctgtctttcagatctaaaaaaaaaaaaaaaaaaaaaaaaaaaaaaaaaaaaaaaaaaaaaaaaaaaaaaaaaaaaaaaaaaaaaaaaaaaaaaaaaaaaaaaaaaaaaaaaaaaagaatt

SEQ ID NO: 1493 - RNA, 883 nt, synthetic construct
  misc_feature 1..883: note Artificial____CBFbeta(1-165)_Linker_HIF1alpha(549-575) mRNA opt4
  source 1..883: mol_type = other RNA
aggagagtcccgcagtcggcgtccagcggctctgcttgttcgtgtgtgtgtcgttgcaggccttattcaagcttaccatgcccagagtggtgcccgaccagagaagcaagttcgagaacgaggagttcttcagaaagctgagcagagagtgcgagatcaagtacaccggcttcagagacagaccccacgaggagagacaggccagattccagaacgcctgcagagacggcagaagcgagatcgccttcgtggccaccggcaccaacctgagcctgcagttcttccccgccagctggcagggcgagcagagacagacccccagcagagagtacgtggacctggagagagaggccggcaaggtgtacctgaaggcccccatgatcctgaacggcgtgtgcgtgatctggaagggctggatcgacctgcagagactggacggcatgggctgcctggagttcgacgaggagagagcccagcaggaggacgccctggcccagcaggccttcgaggaggccagaagaagaaccagagagttcgaggacagagacagaagccacagagaggagatggagggcggcagcggcggcagcggcggcagcggcggcagcggcggcggccccttcagcacccaggacaccgacctggacctggagatgctggccccctacatccccatggacgacgacttccagctgagatgatgatgaggactagtccctgttcccagagcccacttttttttctttttttgaaataaaatagcctgtctttcagatctaaaaaaaaaaaaaaaaaaaaaaaaaaaaaaaaaaaaaaaaaaaaaaaaaaaaaaaaaaaaaaaaaaaaaaaaaaaaaaaaaaaaaaaaaaaaaaaaaaaagaatt

SEQ ID NO: 1494 - RNA, 2518 nt, synthetic construct
  misc_feature 1..2518: note = Artificial____RUNX1(1-177)_N_RUNX1T1a(31-604) mRNA opt4
  source 1..2518: mol_type = other RNA
aggagagtcccgcagtcggcgtccagcggctctgcttgttcgtgtgtgtgtcgttgcaggccttattcaagcttaccatgagaatccccgtggacgccagcaccagcagaagattcaccccccccagcaccgccctgagccccggcaagatgagcgaggccctgcccctgggcgcccccgacgccggcgccgccctggccggcaagctgagaagcggcgacagaagcatggtggaggtgctggccgaccaccccggcgagctggtgagaaccgacagccccaacttcctgtgcagcgtgctgcccacccactggagatgcaacaagaccctgcccatcgccttcaaggtggtggccctgggcgacgtgcccgacggcaccctggtgaccgtgatggccggcaacgacgagaactacagcgccgagctgagaaacgccaccgccgccatgaagaaccaggtggccagattcaacgacctgagattcgtgggcagaagcggcagaggcaagagcttcaccctgaccatcaccgtgttcaccaaccccccccaggtggccacctaccacagagccatcaagatcaccgtggacggccccagagagcccagaaacagaaccgagaagcacagcaccatgcccgacagccccgtggacgtgaagacccagagcagactgaccccccccaccatgccccccccccccaccacccagggcgcccccagaaccagcagcttcacccccaccaccctgaccaacggcaccagccacagccccaccgccctgaacggcgcccccagcccccccaacggcttcagcaacggccccagcagcagcagcagcagcagcctggccaaccagcagctgccccccgcctgcggcgccagacagctgagcaagctgaagagattcctgaccaccctgcagcagttcggcaacgacatcagccccgagatcggcgagagagtgagaaccctggtgctgggcctggtgaacagcaccctgaccatcgaggagttccacagcaagctgcaggaggccaccaacttccccctgagacccttcgtgatccccttcctgaaggccaacctgcccctgctgcagagagagctgctgcactgcgccagactggccaagcagaaccccgcccagtacctggcccagcacgagcagctgctgctggacgccagcaccaccagccccgtggacagcagcgagctgctgctggacgtgaacgagaacggcaagagaagaacccccgacagaaccaaggagaacggcttcgacagagagcccctgcacagcgagcaccccagcaagagaccctgcaccatcagccccggccagagatacagccccaacaacggcctgagctaccagcccaacggcctgccccaccccacccccccccccccccagcactacagactggacgacatggccatcgcccaccactacagagacagctacagacaccccagccacagagacctgagagacagaaacagacccatgggcctgcacggcaccagacaggaggagatgatcgaccacagactgaccgacagagagtgggccgaggagtggaagcacctggaccacctgctgaactgcatcatggacatggtggagaagaccagaagaagcctgaccgtgctgagaagatgccaggaggccgacagagaggagctgaactactggatcagaagatacagcgacgccgaggacctgaagaagggcggcggcagcagcagcagccacagcagacagcagagccccgtgaaccccgaccccgtggccctggacgcccacagagagttcctgcacagacccgccagcggctacgtgcccgaggagatctggaagaaggccgaggaggccgtgaacgaggtgaagagacaggccatgaccgagctgcagaaggccgtgagcgaggccgagagaaaggcccacgacatgatcaccaccgagagagccaagatggagagaaccgtggccgaggccaagagacaggccgccgaggacgccctggccgtgatcaaccagcaggaggacagcagcgagagctgctggaactgcggcagaaaggccagcgagacctgcagcggctgcaacaccgccagatactgcggcagcttctgccagcacaaggactgggagaagcaccaccacatctgcggccagaccctgcaggcccagcagcagggcgacacccccgccgtgagcagcagcgtgacccccaacagcggcgccggcagccccatggacaccccccccgccgccacccccagaagcaccacccccggcacccccagcaccatcgagaccacccccagatgatgatgaggactagtccctgttcccagagcccacttttttttctttttttgaaataaaatagcctgtctttcagatctaaaaaaaaaaaaaaaaaaaaaaaaaaaaaaaaaaaaaaaaaaaaaaaaaaaaaaaaaaaaaaaaaaaaaaaaaaaaaaaaaaaaaaaaaaaaaaaaaaaagaatt

SEQ ID NO: 1495 - RNA, 1033 nt, synthetic construct
  misc_feature 1..1033: note = Artificial____RUNX1(1-241)_RUNX1T1b(short) mRNA opt4
  source 1..1033: mol_type = other RNA
aggagagtcccgcagtcggcgtccagcggctctgcttgttcgtgtgtgtgtcgttgcaggccttattcaagcttaccatgagaatccccgtggacgccagcaccagcagaagattcaccccccccagcaccgccctgagccccggcaagatgagcgaggccctgcccctgggcgcccccgacgccggcgccgccctggccggcaagctgagaagcggcgacagaagcatggtggaggtgctggccgaccaccccggcgagctggtgagaaccgacagccccaacttcctgtgcagcgtgctgcccacccactggagatgcaacaagaccctgcccatcgccttcaaggtggtggccctgggcgacgtgcccgacggcaccctggtgaccgtgatggccggcaacgacgagaactacagcgccgagctgagaaacgccaccgccgccatgaagaaccaggtggccagattcaacgacctgagattcgtgggcagaagcggcagaggcaagagcttcaccctgaccatcaccgtgttcaccaaccccccccaggtggccacctaccacagagccatcaagatcaccgtggacggccccagagagcccagaagacacagacagaagctggacgaccagaccaagcccggcagcctgagcttcagcgagagactgagcgagctggagcagctgagaagaaccgccatgagagtgagcccccaccaccccgcccccacccccaaccccagagccagcctgaaccacagcaccgccttcaacccccagccccagagccagatgcaggaggtgggcttctgccacgtggcccaggtgggcctgaagctgctgggctgatgatgaggactagtccctgttcccagagcccacttttttttctttttttgaaataaaatagcctgtctttcagatctaaaaaaaaaaaaaaaaaaaaaaaaaaaaaaaaaaaaaaaaaaaaaaaaaaaaaaaaaaaaaaaaaaaaaaaaaaaaaaaaaaaaaaaaaaaaaaaaaaaagaatt

SEQ ID NO: 1496 - RNA, 2737 nt, synthetic construct
  misc_feature 1..2737: note = Artificial____RUNX1(1-241)_V_RUNX1T1b(22-604) mRNA opt4
  source 1..2737: mol_type = other RNA
aggagagtcccgcagtcggcgtccagcggctctgcttgttcgtgtgtgtgtcgttgcaggccttattcaagcttaccatgagaatccccgtggacgccagcaccagcagaagattcaccccccccagcaccgccctgagccccggcaagatgagcgaggccctgcccctgggcgcccccgacgccggcgccgccctggccggcaagctgagaagcggcgacagaagcatggtggaggtgctggccgaccaccccggcgagctggtgagaaccgacagccccaacttcctgtgcagcgtgctgcccacccactggagatgcaacaagaccctgcccatcgccttcaaggtggtggccctgggcgacgtgcccgacggcaccctggtgaccgtgatggccggcaacgacgagaactacagcgccgagctgagaaacgccaccgccgccatgaagaaccaggtggccagattcaacgacctgagattcgtgggcagaagcggcagaggcaagagcttcaccctgaccatcaccgtgttcaccaaccccccccaggtggccacctaccacagagccatcaagatcaccgtggacggccccagagagcccagaagacacagacagaagctggacgaccagaccaagcccggcagcctgagcttcagcgagagactgagcgagctggagcagctgagaagaaccgccatgagagtgagcccccaccaccccgcccccacccccaaccccagagccagcctgaaccacagcaccgccttcaacccccagccccagagccagatgcaggtgggccccgagaagagagtgcccgccatgcccggcagccccgtggaggtgaagatccagagcagaagcagcccccccaccatgccccccctgccccccatcaaccccggcggccccagacccgtgagcttcacccccaccgccctgagcaacggcatcaaccacagcccccccaccctgaacggcgcccccagccccccccagagattcagcaacggccccgccagcagcaccagcagcgccctgaccaaccagcagctgcccgccacctgcggcgccagacagctgagcaagctgaagagattcctgaccaccctgcagcagttcggcaacgacatcagccccgagatcggcgagaaggtgagaaccctggtgctggccctggtgaacagcaccgtgaccatcgaggagttccactgcaagctgcaggaggccaccaacttccccctgagacccttcgtgatccccttcctgaaggccaacctgcccctgctgcagagagagctgctgcactgcgccagagccgccaagcagacccccagccagtacctggcccagcacgagcacctgctgctgaacaccagcatcgccagccccgccgacagcagcgagctgctgatggaggtgcacggcaacggcaagagacccagccccgagagaagagaggagaacagcttcgacagagacaccatcgcccccgagccccccgccaagagagtgtgcaccatcagccccgcccccagacacagccccgccctgaccgtgcccctgatgaaccccggcggccagttccaccccacccccccccccctgcagcactacaccctggaggacatcgccaccagccacctgtacagagagcccaacaagatgctggagcacagagaggtgagagacagacaccacagcctgggcctgaacggcggctaccaggacgagctggtggaccacagactgaccgagagagagtgggccgacgagtggaagcacctggaccacgccctgaactgcatcatggagatggtggagaagaccagaagaagcatggccgtgctgagaagatgccaggagagcgacagagaggagctgaactactggaagagaagatacaacgagaacaccgagctgagaaagaccggcaccgagctggtgagcagacagcacagccccggcagcgccgacagcctgagcaacgacagccagagagagttcaacagcagacccggcaccggctacgtgcccgtggagttctggaagaagaccgaggaggccgtgaacaaggtgaagatccaggccatgagcgaggtgcagaaggccgtggccgaggccgagcagaaggccttcgaggtgatcgccaccgagagagccagaatggagcagaccatcgccgacgtgaagagacaggccgccgaggacgccttcctggtgatcaacgagcaggaggagagcaccgagaactgctggaactgcggcagaaaggccagcgagacctgcagcggctgcaacatcgccagatactgcggcagcttctgccagcacaaggactgggagagacaccacagactgtgcggccagaacctgcacggccagagcccccacggccagggcagacccctgctgcccgtgggcagaggcagcagcgccagaagcgccgactgcagcgtgcccagccccgccctggacaagaccagcgccaccaccagcagaagcagcacccccgccagcgtgaccgccatcgacaccaacggcctgtgatgatgaggactagtccctgttcccagagcccacttttttttctttttttgaaataaaatagcctgtctttcagatctaaaaaaaaaaaaaaaaaaaaaaaaaaaaaaaaaaaaaaaaaaaaaaaaaaaaaaaaaaaaaaaaaaaaaaaaaaaaaaaaaaaaaaaaaaaaaaaaaaaagaatt

SEQ ID NO: 1497 - RNA, 2737 nt, synthetic construct
  misc_feature 1..2737: note = Artificial____RUNX1(1-241)_I_RUNX1T1b(22-604) mRNA opt4
  source 1..2737: mol_type = other RNA
aggagagtcccgcagtcggcgtccagcggctctgcttgttcgtgtgtgtgtcgttgcaggccttattcaagcttaccatgagaatccccgtggacgccagcaccagcagaagattcaccccccccagcaccgccctgagccccggcaagatgagcgaggccctgcccctgggcgcccccgacgccggcgccgccctggccggcaagctgagaagcggcgacagaagcatggtggaggtgctggccgaccaccccggcgagctggtgagaaccgacagccccaacttcctgtgcagcgtgctgcccacccactggagatgcaacaagaccctgcccatcgccttcaaggtggtggccctgggcgacgtgcccgacggcaccctggtgaccgtgatggccggcaacgacgagaactacagcgccgagctgagaaacgccaccgccgccatgaagaaccaggtggccagattcaacgacctgagattcgtgggcagaagcggcagaggcaagagcttcaccctgaccatcaccgtgttcaccaaccccccccaggtggccacctaccacagagccatcaagatcaccgtggacggccccagagagcccagaagacacagacagaagctggacgaccagaccaagcccggcagcctgagcttcagcgagagactgagcgagctggagcagctgagaagaaccgccatgagagtgagcccccaccaccccgcccccacccccaaccccagagccagcctgaaccacagcaccgccttcaacccccagccccagagccagatgcagatcggccccgagaagagagtgcccgccatgcccggcagccccgtggaggtgaagatccagagcagaagcagcccccccaccatgccccccctgccccccatcaaccccggcggccccagacccgtgagcttcacccccaccgccctgagcaacggcatcaaccacagcccccccaccctgaacggcgcccccagccccccccagagattcagcaacggccccgccagcagcaccagcagcgccctgaccaaccagcagctgcccgccacctgcggcgccagacagctgagcaagctgaagagattcctgaccaccctgcagcagttcggcaacgacatcagccccgagatcggcgagaaggtgagaaccctggtgctggccctggtgaacagcaccgtgaccatcgaggagttccactgcaagctgcaggaggccaccaacttccccctgagacccttcgtgatccccttcctgaaggccaacctgcccctgctgcagagagagctgctgcactgcgccagagccgccaagcagacccccagccagtacctggcccagcacgagcacctgctgctgaacaccagcatcgccagccccgccgacagcagcgagctgctgatggaggtgcacggcaacggcaagagacccagccccgagagaagagaggagaacagcttcgacagagacaccatcgcccccgagccccccgccaagagagtgtgcaccatcagccccgcccccagacacagccccgccctgaccgtgcccctgatgaaccccggcggccagttccaccccacccccccccccctgcagcactacaccctggaggacatcgccaccagccacctgtacagagagcccaacaagatgctggagcacagagaggtgagagacagacaccacagcctgggcctgaacggcggctaccaggacgagctggtggaccacagactgaccgagagagagtgggccgacgagtggaagcacctggaccacgccctgaactgcatcatggagatggtggagaagaccagaagaagcatggccgtgctgagaagatgccaggagagcgacagagaggagctgaactactggaagagaagatacaacgagaacaccgagctgagaaagaccggcaccgagctggtgagcagacagcacagccccggcagcgccgacagcctgagcaacgacagccagagagagttcaacagcagacccggcaccggctacgtgcccgtggagttctggaagaagaccgaggaggccgtgaacaaggtgaagatccaggccatgagcgaggtgcagaaggccgtggccgaggccgagcagaaggccttcgaggtgatcgccaccgagagagccagaatggagcagaccatcgccgacgtgaagagacaggccgccgaggacgccttcctggtgatcaacgagcaggaggagagcaccgagaactgctggaactgcggcagaaaggccagcgagacctgcagcggctgcaacatcgccagatactgcggcagcttctgccagcacaaggactgggagagacaccacagactgtgcggccagaacctgcacggccagagcccccacggccagggcagacccctgctgcccgtgggcagaggcagcagcgccagaagcgccgactgcagcgtgcccagccccgccctggacaagaccagcgccaccaccagcagaagcagcacccccgccagcgtgaccgccatcgacaccaacggcctgtgatgatgaggactagtccctgttcccagagcccacttttttttctttttttgaaataaaatagcctgtctttcagatctaaaaaaaaaaaaaaaaaaaaaaaaaaaaaaaaaaaaaaaaaaaaaaaaaaaaaaaaaaaaaaaaaaaaaaaaaaaaaaaaaaaaaaaaaaaaaaaaaaaagaatt

SEQ ID NO: 1498 - RNA, 1621 nt, synthetic construct
  misc_feature 1..1621: note = Homo sapiens__Q01196-1__RUNX1(K83E_R174Q) mRNA opt5
  source 1..1621: mol_type = other RNA
aggagagtcccgcagtcggcgtccagcggctctgcttgttcgtgtgtgtgtcgttgcaggccttattcaagcttaccatgagaatccccgtggacgccagcacctcccggcgcttcacacctccgtctacggctctgagccccggcaagatgtccgaggccctccctctgggggcgcccgatgctggagccgcccttgctggcaaactgagatctggggaccggagcatggtcgaagttctcgccgatcaccctggagagctggtgcgcaccgactcccccaactttctttgctctgtgctgcctacacattggagatgtaatgaaaccctcccgattgctttcaaggtcgtggccctgggcgatgttcccgacgggacactggtgaccgtcatggcgggaaacgatgagaattacagcgccgaactccggaacgctacagccgctatgaaaaatcaggtggcccgctttaacgacctgagattcgttggccggtccggccgcggaaagagctttacccttacgatcaccgtgttcacaaatcctccccaagtcgcgacctatcacagagccattaaaatcacagtggatgggcctcaggagccccggcgccatagacagaagctggacgatcagaccaagccgggctctctctcctttagcgagcggctgtctgaacttgagcaactgcgcagaacggctatgcgggtgtcccctcaccatcccgcccctacacccaaccccagagctagcctcaatcactctaccgccttcaaccctcagccgcagtcccagatgcaagacacacgccagattcagcccagccctccctggtcctacgatcagtcttatcaatacctggggagcatcgcctcccctagcgtccaccccgctaccccgatctctcctggacgggcgtccggcatgaccacactgagcgccgaactctctagcagactgtccacggctcccgaccttaccgccttttctgaccctcgccagttccccgccctgcctagcatttccgatccccggatgcattatccgggggcttttacatacagccctacccccgttacatctggaatcggcattggcatgtccgccatggggagcgcgaccagatatcacacgtacctgccccctccgtaccccggatcttcccaggctcaaggcgggcctttccaggccagctccccctcttatcatctctactatggagccagcgctggctcctaccagttttctatggtcgggggagagcgcagccctccccggatccttcctccctgcacaaatgcctccaccggcagcgctctgctcaacccgtctctgcctaatcagtccgacgtggtggaggccgaaggcagccactctaactcccccaccaatatggcgcctagcgccagactggaggaagctgtgtggcgcccctattgatgatgaggactagtccctgttcccagagcccacttttttttctttttttgaaataaaatagcctgtctttcagatctaaaaaaaaaaaaaaaaaaaaaaaaaaaaaaaaaaaaaaaaaaaaaaaaaaaaaaaaaaaaaaaaaaaaaaaaaaaaaaaaaaaaaaaaaaaaaaaaaaaagaatt

SEQ ID NO: 1499 - RNA, 2095 nt, synthetic construct
  misc_feature 1..2095: note = Homo sapiens____CBFbeta(1-165)_SMMHC(1527-1972) mRNA opt5
  source 1..2095: mol_type = other RNA
aggagagtcccgcagtcggcgtccagcggctctgcttgttcgtgtgtgtgtcgttgcaggccttattcaagcttaccatgcccagagtggtccctgaccagcggagcaagttcgagaacgaagagtttttccgcaaactgtccagagaatgcgagatcaagtacaccggctttcgggatcgcccgcacgaagagagacaagcccggttccagaatgcttgtcgcgacgggagatctgagattgcctttgttgcgacaggaacgaacctcagcctgcagttctttcccgcttcctggcagggcgaacaacggcagaccccttctcgcgagtatgtggatcttgaaagagaggccgggaaagtgtacctgaaggcccccatgatcctcaatggagtctgcgtgatttggaaaggctggatcgacctgcagcggcttgatgggatgggatgtctggagttcgacgaggaacgcgctcagcaagaagatgccctcgctcagcaggcctttgaggaagcgagacggcgcacaagagagttcgaggaccgggatagaagccatcgcgaagagatggaagttcacgagctggaaaagtccaagcgggccctggagacccagatggaggaaatgaaaacacaactcgaggaactggaggacgaacttcaggctaccgaggatgccaagctgagactcgaggtgaacatgcaggctctgaaaggccaatttgaacgcgaccttcaggcccgggatgagcagaatgaagagaagagacgccagctgcaacggcagctccatgagtatgaaacagagctggaagacgagagaaaacagcgcgcgctggccgctgccgctaagaagaaactcgaaggcgacctgaaggatcttgagctgcaggccgactctgccattaaagggcgggaggaagctatcaagcaactcagaaaactgcaggcgcagatgaaggatttccagcgcgagcttgaagacgcccgggctagcagagatgagatctttgccaccgccaaagaaaacgagaagaaggctaaatccctggaggccgacctcatgcaactgcaggaagatctggcggctgccgagcgggcccgcaagcaggctgacctcgaaaaagaggaactggccgaggagcttgctagctctctgtccggaagaaatgccctccaggatgaaaagcggagactggaggcgcgcattgcccaacttgaagaggagctggaagaggaacagggcaacatggaggctatgagcgaccgggtcagaaaagccacgcagcaagctgaacagctctctaatgagctggccaccgagcgctccacagcgcagaagaacgaaagcgccagacagcaactggagcggcagaataaggaactccgctctaaactgcacgagatggaaggggctgtgaagtccaaattcaagagcaccatcgccgctcttgaggccaaaattgcccagctggaggaacaggttgagcaagaagctagagagaagcaggcggccacaaagtccctcaaacagaaggataaaaagctgaaagaaatcctgcttcaggtggaggacgagcggaagatggctgaacaatacaaggagcaggccgaaaaaggaaacgcccgcgtcaagcagctcaaaagacaactggaggaggctgaagaggaatctcagcggattaatgccaaccgcagaaagctgcagcgggagctcgacgaagcgaccgagagcaatgaggctatgggccgcgaagtgaacgccctgaaatccaaacttagacgggggaacgagacgagcttcgtgccttctagacgctccggaggccggagagtcatcgaaaatgccgatggcagcgaggaagagacagacacccgcgatgctgactttaacgggacaaaggcctctgagtgatgatgaggactagtccctgttcccagagcccacttttttttctttttttgaaataaaatagcctgtctttcagatctaaaaaaaaaaaaaaaaaaaaaaaaaaaaaaaaaaaaaaaaaaaaaaaaaaaaaaaaaaaaaaaaaaaaaaaaaaaaaaaaaaaaaaaaaaaaaaaaaaaagaatt

SEQ ID NO: 1500 - RNA, 1810 nt, synthetic construct
  misc_feature 1..1810: note = Artificial____CBFbeta(1-165)_SMMHC(1527-1877) mRNA opt5
  source 1..1810: mol_type = other RNA
aggagagtcccgcagtcggcgtccagcggctctgcttgttcgtgtgtgtgtcgttgcaggccttattcaagcttaccatgcccagagtggtccctgaccagcggagcaagttcgagaacgaagagtttttccgcaaactgtccagagaatgcgagatcaagtacaccggctttcgggatcgcccgcacgaagagagacaagcccggttccagaatgcttgtcgcgacgggagatctgagattgcctttgttgcgacaggaacgaacctcagcctgcagttctttcccgcttcctggcagggcgaacaacggcagaccccttctcgcgagtatgtggatcttgaaagagaggccgggaaagtgtacctgaaggcccccatgatcctcaatggagtctgcgtgatttggaaaggctggatcgacctgcagcggcttgatgggatgggatgtctggagttcgacgaggaacgcgctcagcaagaagatgccctcgctcagcaggcctttgaggaagcgagacggcgcacaagagagttcgaggaccgggatagaagccatcgcgaagagatggaagttcacgagctggaaaagtccaagcgggccctggagacccagatggaggaaatgaaaacacaactcgaggaactggaggacgaacttcaggctaccgaggatgccaagctgagactcgaggtgaacatgcaggctctgaaaggccaatttgaacgcgaccttcaggcccgggatgagcagaatgaagagaagagacgccagctgcaacggcagctccatgagtatgaaacagagctggaagacgagagaaaacagcgcgcgctggccgctgccgctaagaagaaactcgaaggcgacctgaaggatcttgagctgcaggccgactctgccattaaagggcgggaggaagctatcaagcaactcagaaaactgcaggcgcagatgaaggatttccagcgcgagcttgaagacgcccgggctagcagagatgagatctttgccaccgccaaagaaaacgagaagaaggctaaatccctggaggccgacctcatgcaactgcaggaagatctggcggctgccgagcgggcccgcaagcaggctgacctcgaaaaagaggaactggccgaggagcttgctagctctctgtccggaagaaatgccctccaggatgaaaagcggagactggaggcgcgcattgcccaacttgaagaggagctggaagaggaacagggcaacatggaggctatgagcgaccgggtcagaaaagccacgcagcaagctgaacagctctctaatgagctggccaccgagcgctccacagcgcagaagaacgaaagcgccagacagcaactggagcggcagaataaggaactccgctctaaactgcacgagatggaaggggctgtgaagtccaaattcaagagcaccatcgccgctcttgaggccaaaattgcccagctggaggaacaggttgagcaagaagctagagagaagcaggcggccacaaagtccctcaaacagaaggataaaaagctgaaagaaatcctgcttcaggtggaggacgagcggaagatggctgaacaatacaaggagcaggccgaaaaaggaaacgcctgatgatgaggactagtccctgttcccagagcccacttttttttctttttttgaaataaaatagcctgtctttcagatctaaaaaaaaaaaaaaaaaaaaaaaaaaaaaaaaaaaaaaaaaaaaaaaaaaaaaaaaaaaaaaaaaaaaaaaaaaaaaaaaaaaaaaaaaaaaaaaaaaaagaatt

SEQ ID NO: 1501 - RNA, 871 nt, synthetic construct
  misc_feature 1..871: note = Artificial____CBFbeta(1-165)_Linker_Lifeact mRNA opt5
  source 1..871: mol_type = other RNA
aggagagtcccgcagtcggcgtccagcggctctgcttgttcgtgtgtgtgtcgttgcaggccttattcaagcttaccatgcccagagtggtccctgaccagcggagcaagttcgagaacgaagagtttttccgcaaactgtccagagaatgcgagatcaagtacaccggctttcgggatcgcccgcacgaagagagacaagcccggttccagaatgcttgtcgcgacgggagatctgagattgcctttgttgcgacaggaacgaacctcagcctgcagttctttcccgcttcctggcagggcgaacaacggcagaccccttctcgcgagtatgtggatcttgaaagagaggccgggaaagtgtacctgaaggcccccatgatcctcaatggagtctgcgtgatttggaaaggctggatcgacctgcagcggcttgatgggatgggatgtctggagttcgacgaggaacgcgctcagcaagaagatgccctcgctcagcaggcctttgaggaagcgagacggcgcacaagagagttcgaggaccgggatagaagccatcgcgaagagatggaaggcggctccgggggatctggcgggagcggaggctccgggggaggcggcgttgccgacctgattaagaagtttgagagcatctctaaagaagagggggatcctcccgtggctacctgatgatgaggactagtccctgttcccagagcccacttttttttctttttttgaaataaaatagcctgtctttcagatctaaaaaaaaaaaaaaaaaaaaaaaaaaaaaaaaaaaaaaaaaaaaaaaaaaaaaaaaaaaaaaaaaaaaaaaaaaaaaaaaaaaaaaaaaaaaaaaaaaaagaatt

SEQ ID NO: 1502 - RNA, 838 nt, synthetic construct
  misc_feature 1..838: note = Artificial____CBFbeta(1-165)_HIF1alpha(549-575) mRNA opt5
  source 1..838: mol_type = other RNA
aggagagtcccgcagtcggcgtccagcggctctgcttgttcgtgtgtgtgtcgttgcaggccttattcaagcttaccatgcccagagtggtccctgaccagcggagcaagttcgagaacgaagagtttttccgcaaactgtccagagaatgcgagatcaagtacaccggctttcgggatcgcccgcacgaagagagacaagcccggttccagaatgcttgtcgcgacgggagatctgagattgcctttgttgcgacaggaacgaacctcagcctgcagttctttcccgcttcctggcagggcgaacaacggcagaccccttctcgcgagtatgtggatcttgaaagagaggccgggaaagtgtacctgaaggcccccatgatcctcaatggagtctgcgtgatttggaaaggctggatcgacctgcagcggcttgatgggatgggatgtctggagttcgacgaggaacgcgctcagcaagaagatgccctcgctcagcaggcctttgaggaagcgagacggcgcacaagagagttcgaggaccgggatagaagccatcgcgaagagatggaacctttttccacccaggacacagatctggacctggagatgctcgccccctatattcctatggatgacgacttccaactgcggtgatgatgaggactagtccctgttcccagagcccacttttttttctttttttgaaataaaatagcctgtctttcagatctaaaaaaaaaaaaaaaaaaaaaaaaaaaaaaaaaaaaaaaaaaaaaaaaaaaaaaaaaaaaaaaaaaaaaaaaaaaaaaaaaaaaaaaaaaaaaaaaaaaagaatt

SEQ ID NO: 1503 - RNA, 883 nt, synthetic construct
  misc_feature 1..883: note Artificial____CBFbeta(1-165)_Linker_HIF1alpha(549-575) mRNA opt5
  source 1..883: mol_type = other RNA
aggagagtcccgcagtcggcgtccagcggctctgcttgttcgtgtgtgtgtcgttgcaggccttattcaagcttaccatgcccagagtggtccctgaccagcggagcaagttcgagaacgaagagtttttccgcaaactgtccagagaatgcgagatcaagtacaccggctttcgggatcgcccgcacgaagagagacaagcccggttccagaatgcttgtcgcgacgggagatctgagattgcctttgttgcgacaggaacgaacctcagcctgcagttctttcccgcttcctggcagggcgaacaacggcagaccccttctcgcgagtatgtggatcttgaaagagaggccgggaaagtgtacctgaaggcccccatgatcctcaatggagtctgcgtgatttggaaaggctggatcgacctgcagcggcttgatgggatgggatgtctggagttcgacgaggaacgcgctcagcaagaagatgccctcgctcagcaggcctttgaggaagcgagacggcgcacaagagagttcgaggaccgggatagaagccatcgcgaagagatggaaggcggctccgggggatctggcgggagcggaggctccgggggaggcccttttagcacccaggacacagatctggacctggagatgctcgccccctatattcctatggatgacgacttccaactgcggtgatgatgaggactagtccctgttcccagagcccacttttttttctttttttgaaataaaatagcctgtctttcagatctaaaaaaaaaaaaaaaaaaaaaaaaaaaaaaaaaaaaaaaaaaaaaaaaaaaaaaaaaaaaaaaaaaaaaaaaaaaaaaaaaaaaaaaaaaaaaaaaaaaagaatt

SEQ ID NO: 1504 - RNA, 2518 nt, synthetic construct
  misc_feature 1..2518: note = Artificial____RUNX1(1-177)_N_RUNX1T1a(31-604) mRNA opt5
  source 1..2518: mol_type = other RNA
aggagagtcccgcagtcggcgtccagcggctctgcttgttcgtgtgtgtgtcgttgcaggccttattcaagcttaccatgagaatccccgtggacgccagcacctcccggcgcttcacacctccgtctacggctctgagccccggcaagatgtccgaggccctccctctgggggcgcccgatgctggagccgcccttgctggcaaactgagatctggggaccggagcatggtcgaagttctcgccgatcaccctggagagctggtgcgcaccgactcccccaactttctttgctctgtgctgcctacacattggagatgtaataagaccctcccgattgctttcaaagtcgtggccctgggcgatgttcccgacgggacactggtgaccgtcatggcgggaaacgatgaaaattacagcgccgagctccggaacgctacagccgctatgaagaatcaggtggcccgctttaacgacctgagattcgttggccggtccggccgcgggaaatcttttacccttacgatcaccgtgttcacaaatcctccccaagtcgcgacctatcacagagccattaagatcacagtggatggacctcgggaaccccgcaacagaaccgagaagcattctacgatgccggactcccctgtggatgtcaaaacacagagccggctgacaccccctaccatgccccctcccccgaccacccagggcgctccccgcacatcttcctttacgcctaccacactcaccaatgggacaagccactctcccaccgccctgaacggagctccttccccgcccaatggcttcagcaacgggccttcctctagctccagcagctcccttgccaatcagcaactgccccctgcctgcggagctagacagctcagcaagctgaaacggtttctgacgacactccagcagttcggcaacgacatttctcccgagatcggcgaaagagttcgcaccctggtgcttgggctggtgaatagcaccctcacaatcgaggaatttcattccaagctgcaagaggcgaccaacttccctcttcggccctttgtcattccgttcctgaaagccaacctccctctgctgcagagagagctcctgcactgtgctcgccttgccaagcagaatcccgcccagtacctggctcaacacgaacagctcctgcttgatgcctctacaacgagccccgtggactccagcgagctgctcctggacgttaacgaaaatggaaagcggagaacccctgatcgcacaaaagagaacggcttcgaccgggaaccgctgcattctgagcacccctccaagagaccttgcaccatcagccccgggcagcgctattctcctaataacggactctcctaccaacccaatggcctgcctcatcccacaccgcctccccctcagcactatcggcttgatgacatggcgattgctcaccattacagagatagctatcgccacccctcccatcgggacctgagagatcggaaccgcccgatggggctccacggaaccagacaggaggaaatgatcgaccatcggctgacggatagagagtgggccgaagagtggaaacacctggaccaccttctcaattgtattatggatatggtggaaaagacccgccggtctctgacagtcctgagacgctgccaggaggccgacagagaggaactcaactactggatccggcgctacagcgacgctgaggatctgaaaaagggcggcgggtcctctagctcccatagcagacaacagtctcctgtgaatcccgaccctgttgcccttgatgctcaccgggaatttctgcatcgccccgcctccggatatgtgcccgaggaaatttggaaaaaggcggaggaggccgtcaacgaagtgaagagacaggctatgaccgagctccagaaagccgtcagcgaagctgagcggaaggcccacgacatgatcacaaccgagcgcgcgaaaatggaaagaacggtggccgaggctaagcggcaagccgctgaagatgccctggccgttatcaatcagcaggaggactcttccgaaagctgttggaactgcggccgcaaagctagcgagacatgtagcgggtgcaataccgcgagatactgtggatccttctgccagcacaaggattgggagaagcatcaccatatttgcggccaaacactgcaggcccagcagcaaggggacacccctgctgtgtcttcttccgtcaccccgaacagcggcgccggatcccccatggatacacctcccgccgctacgcctcggtctaccacacccggcacccctagcacaatcgaaaccacgccgagatgatgatgaggactagtccctgttcccagagcccacttttttttctttttttgaaataaaatagcctgtctttcagatctaaaaaaaaaaaaaaaaaaaaaaaaaaaaaaaaaaaaaaaaaaaaaaaaaaaaaaaaaaaaaaaaaaaaaaaaaaaaaaaaaaaaaaaaaaaaaaaaaaaagaatt

SEQ ID NO: 1505 - RNA, 1033 nt, synthetic construct
  misc_feature 1..1033: note = Artificial____RUNX1(1-241)_RUNX1T1b(short) mRNA opt5
  source 1..1033: mol_type = other RNA
aggagagtcccgcagtcggcgtccagcggctctgcttgttcgtgtgtgtgtcgttgcaggccttattcaagcttaccatgagaatccccgtggacgccagcacctcccggcgcttcacacctccgtctacggctctgagccccggcaagatgtccgaggccctccctctgggggcgcccgatgctggagccgcccttgctggcaaactgagatctggggaccggagcatggtcgaagttctcgccgatcaccctggagagctggtgcgcaccgactcccccaactttctttgctctgtgctgcctacacattggagatgtaataagaccctcccgattgctttcaaagtcgtggccctgggcgatgttcccgacgggacactggtgaccgtcatggcgggaaacgatgaaaattacagcgccgagctccggaacgctacagccgctatgaagaatcaggtggcccgctttaacgacctgagattcgttggccggtccggccgcgggaaatcttttacccttacgatcaccgtgttcacaaatcctccccaagtcgcgacctatcacagagccattaagatcacagtggatggacctcgggaaccccgcagacatcggcagaagctggacgatcagaccaaaccgggcagcctctcctttagcgagcgcctgtctgagcttgaacagctgagacggacggctatgagagtgtcccctcaccatcccgcccctacacccaacccccgcgctagcctcaatcactctaccgccttcaaccctcaaccgcagtcccagatgcaggaggtcgggttttgccacgttgcccaagtgggactgaagctgctcggctgatgatgaggactagtccctgttcccagagcccacttttttttctttttttgaaataaaatagcctgtctttcagatctaaaaaaaaaaaaaaaaaaaaaaaaaaaaaaaaaaaaaaaaaaaaaaaaaaaaaaaaaaaaaaaaaaaaaaaaaaaaaaaaaaaaaaaaaaaaaaaaaaaagaatt

SEQ ID NO: 1506 - RNA, 2737 nt, synthetic construct
  misc_feature 1..2737: note = Artificial____RUNX1(1-241)_V_RUNX1T1b(22-604) mRNA opt5
  source 1..2737: mol_type = other RNA
aggagagtcccgcagtcggcgtccagcggctctgcttgttcgtgtgtgtgtcgttgcaggccttattcaagcttaccatgagaatccccgtggacgccagcacctcccggcgcttcacacctccgtctacggctctgagccccggcaagatgtccgaggccctccctctgggggcgcccgatgctggagccgcccttgctggcaaactgagatctggggaccggagcatggtcgaagttctcgccgatcaccctggagagctggtgcgcaccgactcccccaactttctttgctctgtgctgcctacacattggagatgtaataagaccctcccgattgctttcaaagtcgtggccctgggcgatgttcccgacgggacactggtgaccgtcatggcgggaaacgatgaaaattacagcgccgagctccggaacgctacagccgctatgaagaatcaggtggcccgctttaacgacctgagattcgttggccggtccggccgcgggaaatcttttacccttacgatcaccgtgttcacaaatcctccccaagtcgcgacctatcacagagccattaagatcacagtggatggacctcgggaaccccgcagacatcggcagaagctggacgatcagaccaaaccgggcagcctctcctttagcgagcgcctgtctgagcttgaacagctgagacggacggctatgagagtgtcccctcaccatcccgcccctacacccaacccccgcgctagcctcaatcactctaccgccttcaaccctcaaccgcagtcccagatgcaggtcgggcccgagaagcgggttcctgccatgcccggaagccctgtggaagtgaaaattcaatccagatctagccctccgacaatgcctcccctgcctcccatcaatcctggcgggccccgcccggtctcctttacccctaccgctctgagcaacggaatcaatcactctcctcccacactcaacggcgcgccctccccgccccagcggttcagcaatggccctgcctctagcacgtcctctgctctgaccaaccagcagcttcccgccacatgcggggccagacaactgagcaagctcaaacgctttctgaccacacttcagcagttcggaaacgacatttcccctgagatcggcgagaaggtgcggaccctggttctcgctctggtgaatagcacggtcacaattgaagagtttcattgtaagctgcaagaagccaccaacttccccctcagacctttcgtgatcccctttctgaaagcgaatcttccgctgctccagcgcgagctgcttcactgcgctcgggccgccaagcagaccccttctcagtacctggctcaacatgaacacctcctgctgaacacatccattgccagccccgctgattcttccgagctcctgatggaggttcacgggaatggaaaaagacctagccccgaacgccgggaggaaaactccttcgacagagacaccatcgccccggagcctcccgcgaagcgggtgtgtacaatttctcctgctccccgccatagccccgcccttacggtccctctgatgaatccgggcgggcagtttcaccccacccctccccctctccagcattatacactggaagatatcgccacctcccacctgtacagagagcccaacaaaatgcttgagcatcgggaagtgagagaccgccaccactctctcggactgaatggcggctatcaggatgagctggtcgaccatcggctcacagaaagagagtgggctgatgaatggaagcacctggaccatgcccttaactgcatcatggagatggtggagaaaacccgcagaagcatggcggttctgcggcgctgtcaagaatccgatagagaggaactcaattactggaagcggcgctataacgagaatacggagctgagaaagaccgggacagaactggtgagccggcagcactctcctggatccgccgacagcctttctaacgattcccagcgcgagttcaatagcagaccgggcaccgggtacgtccccgtggaattttggaaaaagacagaggaagctgttaacaaagtgaagattcaggccatgtctgaggtccaaaaagctgtggccgaggccgaacagaaggctttcgaggtgatcgcgaccgaacgggcccgcatggagcagacgattgctgacgttaagagacaggccgccgaagatgcttttctcgtcatcaacgagcaagaggaaagcacagagaattgctggaactgtggacggaaagcctccgaaacctgcagcggctgtaatattgcgagatactgcgggtctttctgccagcacaaggactgggagcgccatcaccggctgtgtggccagaacctgcatggacaatcccctcacggccaggggagacccctcctgcctgtgggacgcggcagctccgctcggtctgccgactgcagcgtgccctccccggcccttgataaaacatctgctaccaccagcagatcctctacacccgccagcgtcacggcgatcgacaccaatgggctgtgatgatgaggactagtccctgttcccagagcccacttttttttctttttttgaaataaaatagcctgtctttcagatctaaaaaaaaaaaaaaaaaaaaaaaaaaaaaaaaaaaaaaaaaaaaaaaaaaaaaaaaaaaaaaaaaaaaaaaaaaaaaaaaaaaaaaaaaaaaaaaaaaaagaatt

SEQ ID NO: 1507 - RNA, 2737 nt, synthetic construct
  misc_feature 1..2737: note = Artificial____RUNX1(1-241)_I_RUNX1T1b(22-604) mRNA opt5
  source 1..2737: mol_type = other RNA
aggagagtcccgcagtcggcgtccagcggctctgcttgttcgtgtgtgtgtcgttgcaggccttattcaagcttaccatgagaatccccgtggacgccagcacctcccggcgcttcacacctccgtctacggctctgagccccggcaagatgtccgaggccctccctctgggggcgcccgatgctggagccgcccttgctggcaaactgagatctggggaccggagcatggtcgaagttctcgccgatcaccctggagagctggtgcgcaccgactcccccaactttctttgctctgtgctgcctacacattggagatgtaataagaccctcccgattgctttcaaagtcgtggccctgggcgatgttcccgacgggacactggtgaccgtcatggcgggaaacgatgaaaattacagcgccgagctccggaacgctacagccgctatgaagaatcaggtggcccgctttaacgacctgagattcgttggccggtccggccgcgggaaatcttttacccttacgatcaccgtgttcacaaatcctccccaagtcgcgacctatcacagagccattaagatcacagtggatggacctcgggaaccccgcagacatcggcagaagctggacgatcagaccaaaccgggcagcctctcctttagcgagcgcctgtctgagcttgaacagctgagacggacggctatgagagtgtcccctcaccatcccgcccctacacccaacccccgcgctagcctcaatcactctaccgccttcaaccctcaaccgcagtcccagatgcagattgggcccgagaagcgggtccctgccatgcccggaagccctgttgaagtgaaaatccaatccagatctagccctccgacaatgcctcccctgcctcccatcaatcctggcgggccccgcccggtgtcctttacccctaccgctctgagcaacggaattaatcactctcctcccacactcaacggcgcgccctccccgccccagcggttcagcaatggccctgcctctagcacgtcctctgctctgaccaaccagcagcttcccgccacatgcggggccagacaactgagcaagctcaaacgctttctgaccacacttcagcagttcggaaacgacatctcccctgagattggcgagaaggtccggaccctggtgctcgctctggttaatagcacggtgacaatcgaagagtttcattgtaagctgcaagaagccaccaacttccccctcagacctttcgtcattccctttctgaaagcgaatcttccgctgctccagcgcgagctgcttcactgcgctcgggccgccaagcagaccccttctcagtacctggctcaacatgaacacctcctgctgaacacatccatcgccagccccgctgattcttccgagctcctgatggaggtgcacgggaatggaaaaagacctagccccgaacgccgggaggaaaactccttcgacagagacaccattgccccggagcctcccgcgaagcgggtttgtacaatctctcctgctccccgccatagccccgcccttacggtgcctctgatgaatccgggcgggcagtttcaccccacccctccccctctccagcattatacactggaagatatcgccacctcccacctgtacagagagcccaacaaaatgcttgagcatcgggaagtcagagaccgccaccactctctcggactgaatggcggctatcaggatgagctggtggaccatcggctcacagaaagagagtgggctgatgaatggaagcacctggaccatgcccttaactgcattatggagatggtcgagaaaacccgcagaagcatggcggtgctgcggcgctgtcaagaatccgatagagaggaactcaattactggaagcggcgctataacgagaatacggagctgagaaagaccgggacagaactggttagccggcagcactctcctggatccgccgacagcctttctaacgattcccagcgcgagttcaatagcagaccgggcaccgggtacgtgcccgtcgaattttggaaaaagacagaggaagctgtgaacaaagttaagatccaggccatgtctgaggtgcaaaaagctgtcgccgaggccgaacagaaggctttcgaggtgattgcgaccgaacgggcccgcatggagcagacgatcgctgacgtgaagagacaggccgccgaagatgcttttctcgttattaacgagcaagaggaaagcacagagaattgctggaactgtggacggaaagcctccgaaacctgcagcggctgtaatatcgcgagatactgcgggtctttctgccagcacaaggactgggagcgccatcaccggctgtgtggccagaacctgcatggacaatcccctcacggccaggggagacccctcctgcctgtcggacgcggcagctccgctcggtctgccgactgcagcgtgccctccccggcccttgataaaacatctgctaccaccagcagatcctctacacccgccagcgtgacggcgatcgacaccaatgggctgtgatgatgaggactagtccctgttcccagagcccacttttttttctttttttgaaataaaatagcctgtctttcagatctaaaaaaaaaaaaaaaaaaaaaaaaaaaaaaaaaaaaaaaaaaaaaaaaaaaaaaaaaaaaaaaaaaaaaaaaaaaaaaaaaaaaaaaaaaaaaaaaaaaagaatt

SEQ ID NO: 1508 - RNA, 1621 nt, synthetic construct
  misc_feature 1..1621: note = Homo sapiens__Q01196-1__RUNX1(K83E_R174Q) mRNA opt11
  source 1..1621: mol_type = other RNA
aggagagtcccgcagtcggcgtccagcggctctgcttgttcgtgtgtgtgtcgttgcaggccttattcaagcttaccatgcgcatcccagtagacgcctcaacctcacgtcgcttcacccctccctcaacagccctctcacccggcaaaatgtccgaagcattacccctcggtgcccccgacgcaggcgcagcactcgccggcaaacttcgatctggcgaccgatccatggtcgaagtcctagccgaccaccccggcgaactcgtacgaacagactcacccaatttcctctgctccgtcctccccactcactggcgctgcaacgaaaccctgcccattgccttcaaagtcgtcgcacttggcgacgtcccagacggcaccctagtaacagtaatggccggaaacgacgaaaactactcagcagaactacgcaacgccaccgccgccatgaaaaaccaagtagcccgcttcaacgatctacgattcgtcggccgatccggacgtggcaaatccttcactcttacaatcacagtcttcacaaatcccccacaagtcgccacctaccaccgcgccatcaaaattaccgttgacggcccccaagaaccaagacgccatcgtcaaaaacttgacgaccaaaccaaacccggctcactatcattctccgaacgcctctccgaactcgaacaactccgccgcaccgccatgcgcgtctcaccccaccaccccgctcccacaccaaaccccagggcctcccttaaccactccaccgcattcaacccccaaccacaatcccaaatgcaagacacacgacaaatacaaccatccccaccgtggtcatacgaccaatcttaccaatacctcggttctatagcctccccatccgtccacccagccacacccatctcccccggccgcgcatccggaatgaccacactctcagccgaactctcctcccgcctatcaaccgcccctgacctcaccgccttttccgacccccgacaattccccgcactaccgtcaatctccgacccccgaatgcactatcccggcgccttcacctactcccccacacctgtaacctccggcatcggcatcggcatgtccgccatgggaagcgccaccagatatcatacttacctacccccaccttatccaggatcctcacaagcccaaggcggcccttttcaagcctcctccccctcctaccatctctactacggcgcctccgccggctcctaccaattctccatggtcggcggcgaacgatcaccaccccgaatcctccctccctgcaccaacgcatcgaccggatcggccctcttaaacccctccctccccaaccaatcagacgtcgtcgaagccgaaggatctcactccaactcccccacaaacatggcaccttcagcccgcctcgaagaagccgtctggcgcccctactaatgatgaggactagtccctgttcccagagcccacttttttttctttttttgaaataaaatagcctgtctttcagatctaaaaaaaaaaaaaaaaaaaaaaaaaaaaaaaaaaaaaaaaaaaaaaaaaaaaaaaaaaaaaaaaaaaaaaaaaaaaaaaaaaaaaaaaaaaaaaaaaaaagaatt

SEQ ID NO: 1509 - RNA, 2095 nt, synthetic construct
  misc_feature 1..2095: note = Homo sapiens____CBFbeta(1-165)_SMMHC(1527-1972) mRNA opt11
  source 1..2095: mol_type = other RNA
aggagagtcccgcagtcggcgtccagcggctctgcttgttcgtgtgtgtgtcgttgcaggccttattcaagcttaccatgccaagggtggtgcccgaccagagaagcaagttcgaaaatgaggaatttttccggaagctgagcagggaatgcgagataaaatacacgggcttccgagacagaccacacgaagagaggcaagcgaggttccaaaacgcctgcagagacggaagaagcgagatagcgttcgtggccacggggacgaacctgagcctacagttcttccctgcaagctggcaaggagaacagaggcagacaccgagtagggagtacgtggacctggagagggaggcggggaaggtgtacctgaaggcaccaatgatactaaatggagtatgtgtaatctggaagggatggatagacctgcaacggctggacgggatgggatgcctggagttcgacgaggaaagagcgcagcaagaggacgcgctggcacaacaggcgttcgaggaagcaaggaggcggacgcgagagttcgaggacagggataggagccacagagaggagatggaggtacacgagctagagaaaagcaagagggcgctggaaacacaaatggaggagatgaagacacagctggaggagttggaagacgaactgcaagcgacagaggacgcaaagctgaggctggaagtcaacatgcaggcattaaagggacagttcgagagagacctgcaggcaagagacgagcagaacgaggaaaagaggaggcagctccaaaggcagctgcacgagtacgaaacggaactggaggacgagcgaaagcagagggcgctagcagcagcagcaaagaaaaagctggagggggacctgaaggacctggagttgcaggcagacagcgcaataaaagggagggaagaggcgatcaagcaactaagaaagctgcaggcacaaatgaaggatttccagagagagctagaggatgcaagggcaagccgggacgagatattcgcgacggcaaaagaaaacgagaaaaaggcgaaaagcctagaagcagacctgatgcagctacaggaggatttggcggcggcggagagggcaaggaaacaggcagatctggagaaggaggagctggcggaagagttggcaagtagcctaagcggaaggaatgcgctgcaggacgaaaagcggagactcgaggcgagaatagcacagctagaggaggaactggaggaggagcagggaaacatggaagcgatgagcgacagagtgagaaaggcgacgcaacaggcggaacagctaagcaacgagttagcaacggagagaagtacagcccaaaagaatgaaagtgcaaggcaacagctagagaggcagaacaaggaactgaggagcaagctgcacgagatggaaggagcagtgaaaagcaaattcaaaagcaccatcgcggcgctggaagcgaagatagcgcagctggaggagcaggtagaacaagaggcaagagagaagcaagcggcgacaaagagtctaaagcagaaagacaagaaactgaaagagatactgttacaagtggaggacgaaaggaagatggcagagcaatacaaggagcaggcggaaaaggggaacgcgagggtgaaacagttaaagaggcaactggaggaggcggaggaagagagccaaagaataaacgccaacagaaggaaactacagcgggaattggacgaggcaacagagagtaacgaagccatggggcgagaagtgaacgcactaaagagcaaactgaggcgggggaacgagacgagtttcgtaccgagcaggcggagcggagggagaagggtgatagagaatgcagacggcagcgaagaggaaacggacacgagagacgcagacttcaacgggacgaaggcgagcgaatagtgatgaggactagtccctgttcccagagcccacttttttttctttttttgaaataaaatagcctgtctttcagatctaaaaaaaaaaaaaaaaaaaaaaaaaaaaaaaaaaaaaaaaaaaaaaaaaaaaaaaaaaaaaaaaaaaaaaaaaaaaaaaaaaaaaaaaaaaaaaaaaaaagaatt

SEQ ID NO: 1510 - RNA, 1810 nt, synthetic construct
  misc_feature 1..1810: note = Artificial____CBFbeta(1-165)_SMMHC(1527-1877) mRNA opt11
  source 1..1810: mol_type = other RNA
aggagagtcccgcagtcggcgtccagcggctctgcttgttcgtgtgtgtgtcgttgcaggccttattcaagcttaccatgccgagggtggtgccagaccaaaggagcaagttcgagaacgaggaatttttcagaaagctgagcagagagtgcgagataaagtacacggggtttagagacagaccacacgaggagaggcaggcaaggttccagaacgcatgcagagacgggagaagcgagatagcattcgtagcgacaggaacaaacctaagcctacaatttttcccggcgagctggcagggagagcagagacagacgccaagcagggagtacgtggacctagagagggaagcaggaaaggtgtacctaaaggcaccaatgatactaaatggggtgtgcgtaatatggaaggggtggatagacctacagagactggacgggatgggatgcttggagttcgacgaagagagagcgcaacaggaggacgcactggcacaacaagcattcgaagaggcaaggaggaggacgagagagttcgaggacagagacaggagtcacagggaggaaatggaggtacacgaactagagaaaagcaagagggcgctggagacacagatggaagagatgaaaacgcaactggaggagctggaagacgagctgcaggcaacagaagatgcgaagctaaggctggaggtgaacatgcaggcactgaaaggacagttcgaaagggacctgcaggcgagggacgaacagaacgaggaaaagaggaggcagctccagaggcagctacacgagtacgagacggagttggaagacgagagaaagcaaagagcactagcggcggcggcgaagaaaaagctagagggagacctcaaagatctggagctacaggcagacagcgcgataaagggcagggaggaagcgataaagcagctaaggaagctgcaggcacagatgaaggacttccagagggagctcgaggacgcaagagcgagccgggacgagatattcgccacggcaaaggagaacgaaaagaaggcgaaaagcctggaggcggacctaatgcaactgcaagaagacctggcagcggcagagcgagcgaggaagcaggcagacctagagaaggaggagctggcggaagaactggcgagtagcctgagcggaaggaacgcactgcaggacgagaagaggaggctagaggcaagaatagcgcagctggaggaggagttggaggaggagcaggggaacatggaggcgatgagcgacagagtgagaaaggcgacacagcaagcagagcagttaagcaacgagctggcaacagagagaagcacggcgcaaaagaacgaatcagcgaggcaacagttggagaggcagaacaaggaactaagaagcaagctgcacgagatggagggcgcggtaaagagcaaattcaagtcaacaatagcggcgcttgaggcaaagatagcacagctggaagaacaagtagaacaggaggcgagagagaaacaagcagcgacaaagagcctgaaacagaaggacaagaagttaaaggagatactgctacaggtagaggacgaaagaaaaatggcggaacagtacaaagagcaggcagaaaaggggaacgcataatgatgaggactagtccctgttcccagagcccacttttttttctttttttgaaataaaatagcctgtctttcagatctaaaaaaaaaaaaaaaaaaaaaaaaaaaaaaaaaaaaaaaaaaaaaaaaaaaaaaaaaaaaaaaaaaaaaaaaaaaaaaaaaaaaaaaaaaaaaaaaaaaagaatt

SEQ ID NO: 1511 - RNA, 871 nt, synthetic construct
  misc_feature 1..871: note = Artificial____CBFbeta(1-165)_Linker_Lifeact mRNA opt11
  source 1..871: mol_type = other RNA
aggagagtcccgcagtcggcgtccagcggctctgcttgttcgtgtgtgtgtcgttgcaggccttattcaagcttaccatgccgcgcgtggtcccggaccagcgctcgaaatttgaaaatgaagagttctttcgcaagctctcgcgagagtgcgagataaagtacacgggctttcgcgatagaccgcacgaggaaaggcaagcgcgctttcaaaatgcctgtagagatggcaggagcgagatcgcgttcgtggccacgggcacgaacttgagcctgcaatttttcccggcctcgtggcagggcgagcagaggcaaacgccctcgcgcgagtacgtggacttggaaagggaagcgggcaaggtgtatctaaaggccccgatgatactaaatggagtgtgcgtgatctggaaagggtggatagacctgcaaaggctcgatggaatgggctgtctagagttcgatgaggaacgcgcgcaacaggaagacgcattggcacagcaagcgttcgaggaagcacgcaggagaacgcgcgagttcgaggacagggacaggagccatcgcgaggaaatggaagggggctcgggagggagcgggggctctggcgggagcgggggaggaggcgtggccgatctcatcaaaaagttcgagagcataagcaaagaagagggcgatcccccggtagcgacatagtgatgaggactagtccctgttcccagagcccacttttttttctttttttgaaataaaatagcctgtctttcagatctaaaaaaaaaaaaaaaaaaaaaaaaaaaaaaaaaaaaaaaaaaaaaaaaaaaaaaaaaaaaaaaaaaaaaaaaaaaaaaaaaaaaaaaaaaaaaaaaaaaagaatt

SEQ ID NO: 1512 - RNA, 838 nt, synthetic construct
  misc_feature 1..838: note = Artificial____CBFbeta(1-165)_HIF1alpha(549-575) mRNA opt11
  source 1..838: mol_type = other RNA
aggagagtcccgcagtcggcgtccagcggctctgcttgttcgtgtgtgtgtcgttgcaggccttattcaagcttaccatgccgcgcgtggtcccggaccagcgctcgaaatttgaaaatgaagagttctttcgaaagctctcgcgcgagtgcgagatcaaatacacgggcttccgcgatcgcccgcacgaggaaaggcaagcgcgctttcaaaatgcctgtcgcgatggcaggagcgagatcgcgttcgtggccacgggcacgaacctgagcctgcaatttttcccggcctcgtggcagggcgagcaaaggcaaacgccctcgcgcgagtacgtggacttggaaagggaagcgggcaaggtctatctcaaggccccgatgatactcaatggcgtgtgcgtgatctggaaagggtggatagacttgcaaaggctcgatggcatgggctgtctcgagttcgacgaggaacgcgcgcaacaggaagatgccctggcccagcaagcgttcgaggaagcgcgcaggcgcacgcgcgagttcgaggacagagacaggagccaccgagaggaaatggaaccgttctcgacccaggacacggacctggacttggaaatgctcgcgccctatatcccgatggatgacgatttccagctcaggtaatgatgaggactagtccctgttcccagagcccacttttttttctttttttgaaataaaatagcctgtctttcagatctaaaaaaaaaaaaaaaaaaaaaaaaaaaaaaaaaaaaaaaaaaaaaaaaaaaaaaaaaaaaaaaaaaaaaaaaaaaaaaaaaaaaaaaaaaaaaaaaaaaagaatt

SEQ ID NO: 1513 - RNA, 883 nt, synthetic construct
  misc_feature 1..883: note Artificial____CBFbeta(1-165)_Linker_HIF1alpha(549-575) mRNA opt11
  source 1..883: mol_type = other RNA
aggagagtcccgcagtcggcgtccagcggctctgcttgttcgtgtgtgtgtcgttgcaggccttattcaagcttaccatgccgcgcgtggtcccggaccagcgctcgaaatttgaaaatgaagagttctttcgaaagctatcgcgagagtgcgagatcaagtacacgggattccgcgatcgaccgcacgaggaaagacaagcgcgatttcaaaatgcatgtcgcgatggcaggagcgagatagcgttcgtggccacgggcacaaacttgagcttgcaattcttcccggcatcatggcagggcgagcaaaggcaaacaccctcgcgcgagtacgtggacttggaaagggaagcgggcaaggtctacctaaaggccccgatgatactcaatggagtgtgcgtgatctggaaagggtggatagacttacaaaggctcgatggcatgggatgtctcgagttcgatgaggaacgcgcgcaacaggaagatgccttggcacagcaagcgttcgaggaagcgcgcaggcgaacgcgcgagttcgaagacagagacaggagccatcgagaggaaatggaaggaggatcgggcggaagcgggggctcgggcgggagcgggggcggaccatttagcacgcaagataccgatctagatctcgagatgttggccccgtacatacccatggacgatgactttcaattgcgctagtgatgaggactagtccctgttcccagagcccacttttttttctttttttgaaataaaatagcctgtctttcagatctaaaaaaaaaaaaaaaaaaaaaaaaaaaaaaaaaaaaaaaaaaaaaaaaaaaaaaaaaaaaaaaaaaaaaaaaaaaaaaaaaaaaaaaaaaaaaaaaaaaagaatt

SEQ ID NO: 1514 - RNA, 2518 nt, synthetic construct
  misc_feature 1..2518: note = Artificial____RUNX1(1-177)_N_RUNX1T1a(31-604) mRNA opt11
  source 1..2518: mol_type = other RNA
aggagagtcccgcagtcggcgtccagcggctctgcttgttcgtgtgtgtgtcgttgcaggccttattcaagcttaccatgcgcataccagtagatgcctccacctctcgccgcttcacacctccctcgacagccctcagccccggaaaaatgtccgaagcgctcccacttggcgcacccgacgcaggcgctgccctcgccggaaaactccgtagtggtgaccgctctatggtggaagtcttagccgaccaccccggagaactcgtaagaacagactccccaaacttcctctgctccgtgctacctacacactggcgctgcaacaaaaccctcccgattgccttcaaagtcgtagccctaggcgacgtccccgacggaaccctcgtcaccgtcatggcaggcaatgatgaaaactactccgcagaactccgcaacgccaccgctgcaatgaaaaaccaagtcgcacgattcaatgacctcagattcgtagggcgctccggccgagggaaatcattcaccctcacaatcacagtcttcaccaaccctccacaagtcgcaacataccaccgcgccatcaaaatcacagtcgacggaccccgagaaccccgcaatagaactgagaaacacagcaccatgcccgattcgccagtcgatgtcaaaacccaatcaaggctcaccccgcccacaatgcccccacccccaaccacacagggcgcaccccgcacctcttcattcacccctacaacactaacaaatggcacatcccacagtccaaccgcccttaatggcgccccatccccaccaaacggtttctccaacggcccctcctcttcatcatcatcctccctggctaaccaacaactcccacccgcatgcggagcacgacaactcagcaaactaaaacgattcctcaccactcttcaacaattcggcaacgacatatccccagaaataggcgaacgagtccgaaccctagtcctcggtctagtcaattccacgctcactatagaggagttccactccaaactacaagaagctaccaacttcccactccgaccattcgtcattccattcctcaaggcaaacctccctctgctccaacgtgaactcctacactgcgccagactcgccaagcaaaaccccgcacaatatcttgcccaacacgaacaacttctcttagacgcctccaccacatctcccgtcgactcatctgaacttctcctagatgttaacgaaaacggcaaacgcagaactcccgaccgcaccaaagaaaacgggttcgatagagaaccactacacagcgaacacccctctaaacgcccatgcaccatatctcctggccaacggtactcacctaacaacggtctctcataccaacccaatggcctcccacaccccaccccaccacccccacaacactaccgacttgacgacatggcgatcgcacaccactacagagactcttataggcacccatcccaccgcgatctccgcgaccgcaatcgccccatgggactacacggcactcgccaagaagaaatgatcgaccaccgactaaccgaccgtgaatgggcagaagaatggaaacacctcgaccacctcctaaattgcatcatggacatggtcgagaaaacaaggcgctcactcacggttctccgtcgctgccaagaagcagatcgtgaagaactgaactattggattcgacgatactcagacgccgaagacctcaagaaaggcggaggctcatctagctcccatagtcgccaacaatcacccgtaaacccggacccagtagccctcgacgctcaccgagagttcctacaccgtcccgcctccggatacgtacccgaagaaatatggaagaaagctgaagaagcagtaaacgaagtcaaacgccaagctatgaccgaactacaaaaagccgtaagcgaagctgaacgcaaagcacacgacatgatcactaccgaacgcgcaaaaatggaacgaaccgtcgcagaagccaaacgccaggccgccgaagacgcccttgctgtcataaatcagcaagaagactcctccgaatcctgctggaactgtggccgcaaagccagcgaaacctgctccggttgcaataccgcccgctactgcggttcattctgccagcacaaagactgggaaaaacaccaccacatctgcggtcaaaccctgcaagctcaacaacaaggcgacacccctgccgtctcatccagcgtaacccccaacagcggcgccggctccccaatggacaccccacccgcagccacaccccgatcaacaacacccggaacaccctcgactatcgaaaccacaccccgttagtgatgaggactagtccctgttcccagagcccacttttttttctttttttgaaataaaatagcctgtctttcagatctaaaaaaaaaaaaaaaaaaaaaaaaaaaaaaaaaaaaaaaaaaaaaaaaaaaaaaaaaaaaaaaaaaaaaaaaaaaaaaaaaaaaaaaaaaaaaaaaaaaagaatt

SEQ ID NO: 1515 - RNA, 1033 nt, synthetic construct
  misc_feature 1..1033: note = Artificial____RUNX1(1-241)_RUNX1T1b(short) mRNA opt11
  source 1..1033: mol_type = other RNA
aggagagtcccgcagtcggcgtccagcggctctgcttgttcgtgtgtgtgtcgttgcaggccttattcaagcttaccatgcgcatcccagtcgacgcctccacctcccgccgcttcaccccaccctcaacagcactctcacccggcaaaatgtcagaagcactccctctcggagcacccgacgccggcgccgccctcgccggcaaactccgctcaggcgaccgatcaatggtcgaagtcctagccgaccaccccggagaactcgtccgcaccgactcacccaacttcctctgctccgtcctacccacccactggcgctgcaacaaaaccctccccatcgccttcaaagtcgtcgcactaggcgacgtcccagacggcaccctcgtcaccgtcatggccggcaacgacgaaaactactccgccgaactccgcaacgccacagcagccatgaaaaaccaagtcgcccgcttcaacgacctccgcttcgtaggccgctccggccgcggcaaatccttcaccctaaccatcacagtattcaccaatccaccccaagtcgccacctaccaccgcgctatcaaaatcaccgtcgacggcccccgcgaaccccgccgccaccgacaaaaactcgacgaccaaaccaaacccggctcactctccttctccgaacgcctctccgaactcgaacaactccgccgaacagccatgcgcgtctcaccccaccaccccgcccccacccccaacccccgagcctccctcaaccactcaaccgccttcaacccccaaccacaatcccaaatgcaagaagtcggcttctgccacgtagcccaagtcggtctcaaactcctcggctaatgatgaggactagtccctgttcccagagcccacttttttttctttttttgaaataaaatagcctgtctttcagatctaaaaaaaaaaaaaaaaaaaaaaaaaaaaaaaaaaaaaaaaaaaaaaaaaaaaaaaaaaaaaaaaaaaaaaaaaaaaaaaaaaaaaaaaaaaaaaaaaaaagaatt

SEQ ID NO: 1516 - RNA, 2737 nt, synthetic construct
  misc_feature 1..2737: note = Artificial____RUNX1(1-241)_V_RUNX1T1b(22-604) mRNA opt11
  source 1..2737: mol_type = other RNA
aggagagtcccgcagtcggcgtccagcggctctgcttgttcgtgtgtgtgtcgttgcaggccttattcaagcttaccatgcgcatccccgtggacgcctcaacaagccgacgcttcacgcccccatccaccgccctatcccccggcaaaatgtcagaagccctccccctcggagccccagacgcaggggccgcactcgcaggcaaacttcgatccggggacaggagcatggtcgaagtcctagccgaccaccccggagagctagtccgaaccgactcccccaacttcctgtgctccgtactgccaacccactggcgatgtaacaaaacactccctatagcttttaaagtagtggccctaggagacgttccagacggcaccctcgtcaccgtcatggccggcaacgacgaaaactacagcgccgaactacgcaacgcaactgccgccatgaaaaatcaagtggccagattcaacgacctccgcttcgtcggccgcagcggaagaggaaaatcgttcaccttaaccatcacagttttcacaaacccaccccaggttgcaacatatcaccgagccatcaaaatcactgttgacggcccacgtgaaccaagacggcatcgtcaaaaactagacgaccaaacaaaaccaggttcactctcattttcagaacgcctctcagaactcgaacaactacgacgaaccgctatgcgcgtctcaccccaccaccccgccccgaccccgaacccacgagcatctctgaaccacagcacagccttcaacccacaaccacagtcccaaatgcaagttggacccgagaaacgagtcccagctatgccgggcagccccgtcgaggtcaaaatccaatcgcgcagcagccctcccacaatgcccccactaccacccatcaacccaggcggtccccgccccgtctcattcaccccaacagccctctcaaatggaatcaaccacagccctcccaccctcaacggtgccccctccccaccacaacgcttttcaaacggaccagcgtcctccacctccagcgctctcactaaccaacaactcccagcaacttgcggagccagacaactcagcaaactaaaaagattcctcaccaccctacaacagttcggaaacgacatctcccccgaaataggcgagaaagttcgcactcttgtactagcccttgtaaactccacagtaactatcgaagagttccactgcaaactacaagaagcaaccaacttcccactccgccccttcgtgatcccattcctaaaagcaaacctaccactactccaacgcgaactgctccactgcgcccgtgccgcaaaacagactccctcacaatacctcgcccaacatgaacatcttctcctcaacacatcaattgctagcccagcagactcatccgaacttctcatggaagtccacggaaacggtaaacgaccatctcccgaacgacgcgaagaaaactccttcgaccgcgacaccatcgcccccgaaccacccgccaaacgcgtatgcacaatatcaccggccccgcgccactcccctgcacttaccgtaccccttatgaacccagggggccaattccaccctacacccccacccctgcagcactacactctagaagacattgcaacaagccacctataccgagaacctaacaaaatgctagaacacagagaagtgcgtgaccgccaccacagcctcggcttaaacgggggctaccaagacgaactcgttgatcaccgcctcaccgaacgagagtgggcagatgaatggaaacacctggaccacgccctaaactgcatcatggaaatggtcgagaaaaccagacgatcaatggccgtcctaagaaggtgccaagaatcagacagagaagaactcaactattggaaacgacgatataacgaaaacaccgaactcagaaaaacaggcactgaactcgtctcgagacaacactcaccaggctctgcagactctctttccaacgactcacaacgcgagttcaatagccgaccaggcaccggctacgtccccgtcgaattttggaagaaaaccgaagaagccgtaaacaaagtcaaaatacaagcaatgtccgaagtccaaaaagccgtcgccgaagcagaacaaaaagccttcgaggttatcgcgaccgaacgcgcccgtatggaacagacaatagccgacgtcaaacgacaggctgccgaagacgctttcctcgttatcaacgaacaagaagaatcaactgaaaactgctggaactgcggccggaaagcgtccgaaacctgctcaggctgcaacatcgctcgttattgcggctccttttgccaacataaagactgggagcgccaccaccgcctatgcggccaaaacctacacggccaaagcccccacggacaaggccgacctctcctacccgtaggccgaggctcctccgcacgctccgccgactgcagcgtccccagccccgcactcgacaaaacttcggcaaccacatcccgcagcagcacccccgcgagcgttacagccatcgacacaaacggactataatgatgaggactagtccctgttcccagagcccacttttttttctttttttgaaataaaatagcctgtctttcagatctaaaaaaaaaaaaaaaaaaaaaaaaaaaaaaaaaaaaaaaaaaaaaaaaaaaaaaaaaaaaaaaaaaaaaaaaaaaaaaaaaaaaaaaaaaaaaaaaaaaagaatt

SEQ ID NO: 1517 - RNA, 2737 nt, synthetic construct
  misc_feature 1..2737: note = Artificial____RUNX1(1-241)_I_RUNX1T1b(22-604) mRNA opt11
  source 1..2737: mol_type = other RNA
aggagagtcccgcagtcggcgtccagcggctctgcttgttcgtgtgtgtgtcgttgcaggccttattcaagcttaccatgaggatacccgtcgacgcctccacgtcacgccgcttcacacccccaagcaccgccctatcacccggcaaaatgtccgaagctctaccactaggtgcgccagacgcaggcgctgctctcgccggaaaactacgatccggggaccgatccatggtcgaagtcctcgctgatcaccccggcgaacttgtccgcacagactccccaaacttcctctgctccgtactcccgactcactggcgttgcaacaaaacacttcctattgcgttcaaggtcgtagccctaggggacgtccccgacggcaccttagtcacagtcatggcgggtaacgacgagaactactcagccgaattacgcaacgctacagcagccatgaaaaaccaggtagctcgcttcaacgacctccggttcgtcggtagaagcggccgaggaaaatcttttaccctcacaatcaccgtgttcaccaacccaccccaagtcgccacctaccaccgggcaatcaaaatcacagttgacggaccccgcgagccccgacgccatcgccaaaaacttgacgaccaaaccaaaccaggatcactatccttctcagagcgactctcagaactcgaacaattacgccggaccgcaatgcgtgtctcaccccaccacccggcccccacgcccaacccccgcgcctcactcaaccactccactgctttcaacccgcaaccccaatcccaaatgcagatcggcccagaaaaacgcgttcccgccatgccaggaagtcccgtcgaagtcaaaatccaatccagatcttccccaccaaccatgcctcccctcccgcccataaacccgggaggtccccgacccgtgtccttcacccccaccgccctctcgaacggcatcaaccactcaccacctaccctaaacggagcaccatccccaccccaacgcttctcaaacggacctgcatcctccacatcgtccgccctcaccaaccaacaactcccagccacatgcggcgcccgtcaactatctaagctaaaacgcttcctaaccactctccagcaatttggcaacgacatatcccccgaaatcggcgaaaaagtccgcacactcgtcttagccctcgtcaattccaccgtcaccatagaagagttccactgcaaactccaagaagccacaaacttcccactccgtccctttgtcatcccattcttaaaggcgaacctaccactactccaaagagaactactccactgcgctcgggccgcaaaacaaacccctagccagtacctagcccaacacgaacatctactactcaacactagcatcgcctcacccgcagactcatctgaactacttatggaagtccacggcaacggcaaacgcccctccccagaaaggcgcgaagaaaactccttcgatcgagacacaatagcacccgaaccacccgccaaacgcgtatgcaccatcagcccagcaccccgacactccccagccctcacggtccctctaatgaacccgggcggacaattccaccccaccccaccacccctacaacactacacattagaagacatagccacatctcacctctaccgcgaacccaataaaatgctggaacaccgcgaagtccgagatagacaccattctctaggactaaatggaggctaccaagacgaacttgtcgaccacagactcacagaacgcgaatgggccgacgaatggaagcacctcgatcatgcccttaactgtatcatggagatggtagagaaaacaagacgatccatggcagttctacgtcgatgccaagagagcgaccgcgaagaactcaactactggaaacgccgctacaacgaaaacacagaactacgaaaaaccggcaccgaactcgtctcccgtcagcactccccgggaagcgccgactcccttagcaacgactcacaacgcgagttcaactctcgccccggaacaggctacgttcctgtcgagttctggaagaaaactgaagaagccgtaaacaaagtcaaaatccaagccatgtcagaagtccaaaaagccgtagcagaagccgaacaaaaggctttcgaagtaattgcaaccgaacgcgcacgtatggaacaaaccatagcagatgtaaaaagacaagccgccgaagacgccttcctcgtcataaacgaacaagaagaatccaccgaaaactgttggaactgcggccgtaaagcctccgaaacatgttctggctgcaacattgcccgttactgtgggtccttctgccaacacaaagattgggaacgccaccaccgcctctgcggacaaaacctccacggccaaagcccccatggtcaaggtagaccactactacccgttggacgcggctccagcgcacgatcagccgactgctcagtgccatcccccgcccttgacaaaacctccgccacaacctcgcgatcatccacaccagcctcagtaacagccatagacaccaacgggctttgatgatgaggactagtccctgttcccagagcccacttttttttctttttttgaaataaaatagcctgtctttcagatctaaaaaaaaaaaaaaaaaaaaaaaaaaaaaaaaaaaaaaaaaaaaaaaaaaaaaaaaaaaaaaaaaaaaaaaaaaaaaaaaaaaaaaaaaaaaaaaaaaaagaatt

SEQ ID NO: 1518 - RNA, 1929 nt, synthetic construct
  misc_feature 1..1929: note = luciferase mRNA R7386
  source 1..1929: mol_type = other RNA
aggagagtcccgcagtcggcgtccagcggctctgcttgttcgtgtgtgtgtcgttgcaggccttattcaagcttaccatggaggacgccaagaacatcaagaagggcccggcgcccttctacccgctggaggacgggaccgccggcgagcagctccacaaggccatgaagcggtacgccctggtgccgggcacgatcgccttcaccgacgcccacatcgaggtcgacatcacctacgcggagtacttcgagatgagcgtgcgcctggccgaggccatgaagcggtacggcctgaacaccaaccaccggatcgtggtgtgctcggagaacagcctgcagttcttcatgccggtgctgggcgccctcttcatcggcgtggccgtcgccccggcgaacgacatctacaacgagcgggagctgctgaacagcatggggatcagccagccgaccgtggtgttcgtgagcaagaagggcctgcagaagatcctgaacgtgcagaagaagctgcccatcatccagaagatcatcatcatggacagcaagaccgactaccagggcttccagtcgatgtacacgttcgtgaccagccacctcccgccgggcttcaacgagtacgacttcgtcccggagagcttcgaccgggacaagaccatcgccctgatcatgaacagcagcggcagcaccggcctgccgaagggggtggccctgccgcaccggaccgcctgcgtgcgcttctcgcacgcccgggaccccatcttcggcaaccagatcatcccggacaccgccatcctgagcgtggtgccgttccaccacggcttcggcatgttcacgaccctgggctacctcatctgcggcttccgggtggtcctgatgtaccggttcgaggaggagctgttcctgcggagcctgcaggactacaagatccagagcgcgctgctcgtgccgaccctgttcagcttcttcgccaagagcaccctgatcgacaagtacgacctgtcgaacctgcacgagatcgccagcgggggcgccccgctgagcaaggaggtgggcgaggccgtggccaagcggttccacctcccgggcatccgccagggctacggcctgaccgagaccacgagcgcgatcctgatcacccccgagggggacgacaagccgggcgccgtgggcaaggtggtcccgttcttcgaggccaaggtggtggacctggacaccggcaagaccctgggcgtgaaccagcggggcgagctgtgcgtgcgggggccgatgatcatgagcggctacgtgaacaacccggaggccaccaacgccctcatcgacaaggacggctggctgcacagcggcgacatcgcctactgggacgaggacgagcacttcttcatcgtcgaccggctgaagtcgctgatcaagtacaagggctaccaggtggcgccggccgagctggagagcatcctgctccagcaccccaacatcttcgacgccggcgtggccgggctgccggacgacgacgccggcgagctgccggccgcggtggtggtgctggagcacggcaagaccatgacggagaaggagatcgtcgactacgtggccagccaggtgaccaccgccaagaagctgcggggcggcgtggtgttcgtggacgaggtcccgaagggcctgaccgggaagctcgacgcccggaagatccgcgagatcctgatcaaggccaagaagggcggcaagatcgccgtgtgaggactagtccctgttcccagagcccacttttttttctttttttgaaataaaatagcctgtctttcagatctaaaaaaaaaaaaaaaaaaaaaaaaaaaaaaaaaaaaaaaaaaaaaaaaaaaaaaaaaaaaaaaatgcatcccccccccccccccccccccccccccccccaaaggctcttttcagagccaccagaatt

SEQ ID NO: 1519 - RNA, 992 nt, synthetic construct
  misc_feature 1..992: note = eGFP mRNA R8720
  source 1..992: mol_type = other RNA
aggagagtcccgcagtcggcgtccagcggctctgcttgttcgtgtgtgtgtcgttgcaggccttattcaagcttaccatggtctccaagggggaggagctgttcacgggcgtcgtcccgatcctcgtggagctcgacggggacgtgaacgggcacaagttctccgtcagcggggagggggagggggacgccacctacgggaagctcacgctcaagttcatctgcaccacggggaagctcccggtcccgtggcccacgctcgtcaccacgctcacctacggggtccagtgcttctcccggtacccggaccacatgaagcagcacgacttcttcaagagcgcgatgccggaggggtacgtgcaggagcggacgatcttcttcaaggacgacgggaactacaagacgcgggcggaggtcaagttcgagggggacacgctcgtcaaccggatcgagctcaaggggatcgacttcaaggaggacgggaacatcctcggccacaagctcgagtacaactacaactcccacaacgtgtacatcatggccgacaagcagaagaacgggatcaaggtcaacttcaagatccggcacaacatcgaggacgggtccgtccagctggcggaccactaccagcagaacaccccgatcggggacgggccggtcctcctcccggacaaccactacctctccacccagagcgccctctccaaggacccgaacgagaagcgggaccacatggtgctcctcgagttcgtcacggccgcgggcatcaccctggggatggacgagctctacaagtgaggactagtccctgttcccagagcccacttttttttctttttttgaaataaaatagcctgtctttcagatctcaaaggctcttttcagagccaccaaaaaaaaaaaaaaaaaaaaaaaaaaaaaaaaaaaaaaaaaaaaaaaaaaaaaaaaaaaaaaaaaaaaaaaaaaaaaaaaaaaaaaaaaaaaaaaaaaaaa

SEQ ID NO: 1520 - RNA, 1925 nt, synthetic construct
  misc_feature 1..1925: note = luciferase mRNA R8730, R11285
  source 1..1925: mol_type = other RNA
aggagagtcccgcagtcggcgtccagcggctctgcttgttcgtgtgtgtgtcgttgcaggccttattcaagcttaccatggaggacgccaagaacatcaagaagggcccggcgcccttctacccgctggaggacgggaccgccggcgagcagctccacaaggccatgaagcggtacgccctggtgccgggcacgatcgccttcaccgacgcccacatcgaggtcgacatcacctacgcggagtacttcgagatgagcgtgcgcctggccgaggccatgaagcggtacggcctgaacaccaaccaccggatcgtggtgtgctcggagaacagcctgcagttcttcatgccggtgctgggcgccctcttcatcggcgtggccgtcgccccggcgaacgacatctacaacgagcgggagctgctgaacagcatggggatcagccagccgaccgtggtgttcgtgagcaagaagggcctgcagaagatcctgaacgtgcagaagaagctgcccatcatccagaagatcatcatcatggacagcaagaccgactaccagggcttccagtcgatgtacacgttcgtgaccagccacctcccgccgggcttcaacgagtacgacttcgtcccggagagcttcgaccgggacaagaccatcgccctgatcatgaacagcagcggcagcaccggcctgccgaagggggtggccctgccgcaccggaccgcctgcgtgcgcttctcgcacgcccgggaccccatcttcggcaaccagatcatcccggacaccgccatcctgagcgtggtgccgttccaccacggcttcggcatgttcacgaccctgggctacctcatctgcggcttccgggtggtcctgatgtaccggttcgaggaggagctgttcctgcggagcctgcaggactacaagatccagagcgcgctgctcgtgccgaccctgttcagcttcttcgccaagagcaccctgatcgacaagtacgacctgtcgaacctgcacgagatcgccagcgggggcgccccgctgagcaaggaggtgggcgaggccgtggccaagcggttccacctcccgggcatccgccagggctacggcctgaccgagaccacgagcgcgatcctgatcacccccgagggggacgacaagccgggcgccgtgggcaaggtggtcccgttcttcgaggccaaggtggtggacctggacaccggcaagaccctgggcgtgaaccagcggggcgagctgtgcgtgcgggggccgatgatcatgagcggctacgtgaacaacccggaggccaccaacgccctcatcgacaaggacggctggctgcacagcggcgacatcgcctactgggacgaggacgagcacttcttcatcgtcgaccggctgaagtcgctgatcaagtacaagggctaccaggtggcgccggccgagctggagagcatcctgctccagcaccccaacatcttcgacgccggcgtggccgggctgccggacgacgacgccggcgagctgccggccgcggtggtggtgctggagcacggcaagaccatgacggagaaggagatcgtcgactacgtggccagccaggtgaccaccgccaagaagctgcggggcggcgtggtgttcgtggacgaggtcccgaagggcctgaccgggaagctcgacgcccggaagatccgcgagatcctgatcaaggccaagaagggcggcaagatcgccgtgtgaggactagtccctgttcccagagcccacttttttttctttttttgaaataaaatagcctgtctttcagatctcaaaggctcttttcagagccaccaaaaaaaaaaaaaaaaaaaaaaaaaaaaaaaaaaaaaaaaaaaaaaaaaaaaaaaaaaaaaaaaaaaaaaaaaaaaaaaaaaaaaaaaaaaaaaaaaaaaa

SEQ ID NO: 1521 - protein, 1455 aa, Homo sapiens
  REGION 1..1455: note = Homo sapiens__O94916-2__NFAT5 protein
MGGACSSFTTSSSPTIYSTSVTDSKAMQVESCSSAVGVSNRGVSEKQLTSNTVQQHPSTPKRHTVLYISPPPEDLLDNSRMSCQDEGCGLESEQSCSMWMEDSPSNFSNMSTSSYNDNTEVPRKSRKRNPKQRPGVKRRDCEESNMDIFDADSAKAPHYVLSQLTTDNKGNSKAGNGTLENQKGTGVKKSPMLCGQYPVKSEGKELKIVVQPETQHRARYLTEGSRGSVKDRTQQGFPTVKLEGHNEPVVLQVFVGNDSGRVKPHGFYQACRVTGRNTTPCKEVDIEGTTVIEVGLDPSNNMTLAVDCVGILKLRNADVEARIGIAGSKKKSTRARLVFRVNIMRKDGSTLTLQTPSSPILCTQPAGVPEILKKSLHSCSVKGEEEVFLIGKNFLKGTKVIFQENVSDENSWKSEAEIDMELFHQNHLIVKVPPYHDQHITLPVSVGIYVVTNAGRSHDVQPFTYTPDPAAAGALNVNVKKEISSPARPCSFEEAMKAMKTTGCNLDKVNIIPNALMTPLIPSSMIKSEDVTPMEVTAEKRSSTIFKTTKSVGSTQQTLENISNIAGNGSFSSPSSSHLPSENEKQQQIQPKAYNPETLTTIQTQDISQPGTFPAVSASSQLPNSDALLQQATQFQTRETQSREILQSDGTVVNLSQLTEASQQQQQSPLQEQAQTLQQQISSNIFPSPNSVSQLQNTIQQLQAGSFTGSTASGSSGSVDLVQQVLEAQQQLSSVLFSAPDGNENVQEQLSADIFQQVSQIQSGVSPGMFSSTEPTVHTRPDNLLPGRAESVHPQSENTLSNQQQQQQQQQQVMESSAAMVMEMQQSICQAAAQIQSELFPSTASANGNLQQSPVYQQTSHMMSALSTNEDMQMQCELFSSPPAVSGNETSTTTTQQVATPGTTMFQTSSSGDGEETGTQAKQIQNSVFQTMVQMQHSGDNQPQVNLFSSTKSMMSVQNSGTQQQGNGLFQQGNEMMSLQSGNFLQQSSHSQAQLFHPQNPIADAQNLSQETQGSLFHSPNPIVHSQTSTTSSEQMQPPMFHSQSTIAVLQGSSVPQDQQSTNIFLSQSPMNNLQTNTVAQEAFFAAPNSISPLQSTSNSEQQAAFQQQAPISHIQTPMLSQEQAQPPQQGLFQPQVALGSLPPNPMPQSQQGTMFQSQHSIVAMQSNSPSQEQQQQQQQQQQQQQQQQQSILFSNQNTMATMASPKQPPPNMIFNPNQNPMANQEQQNQSIFHQQSNMAPMNQEQQPMQFQSQSTVSSLQNPGPTQSESSQTPLFHSSPQIQLVQGSPSSQEQQVTLFLSPASMSALQTSINQQDMQQSPLYSPQNNMPGIQGATSSPQPQATLFHNTAGGTMNQLQNSPGSSQQTSGMFLFGIQNNCSQLLTSGPATLPDQLMAISQPGQPQNEGQPPVTTLLSQQMPENSPLASSINTNQNIEKIDLLVSLQNQGNNLTGSF

SEQ ID NO: 1522 - protein, 17 aa, Homo sapiens
  REGION 1..17: note = Homo sapiens__O94916-2__NFAT5(1-17) protein
MGGACSSFTTSSSPTIY

SEQ ID NO: 1523 - RNA, 4368 nt, Homo sapiens
  misc_feature 1..4368: note = Homo sapiens__O94916-2__NFAT5 CDS wt
  source 1..4368: mol_type = mRNA
atgggcggtgcttgcagctcctttaccacctcttccagccctaccatttattctacctcagtcaccgacagcaaggctatgcaagtggagagctgctcctcagccgtgggggtaagtaacagaggggtaagtgaaaagcagttaaccagtaacacagttcagcagcatccatcaacaccgaagaggcacacagtcttgtacatctcaccaccacctgaggacttgctggataacagtcggatgtcctgccaggatgaggggtgtggattggaatctgagcagagctgcagtatgtggatggaggattccccctccaacttcagtaacatgagcaccagttcctacaatgataacactgaggtacctcgtaaatcacgaaaacgaaatccaaagcagaggccgggggtcaaacgacgagattgtgaagaatctaatatggatatatttgatgccgacagtgccaaagcacctcactatgtgctttctcagcttaccacggacaacaaaggcaactcaaaagcgggaaatggaacattggaaaaccaaaaaggaactggagtaaagaagagccctatgttgtgtggacaatatcctgttaaaagtgagggaaaggagctgaagatagttgtacaacctgagacacagcaccgagctcggtacctgactgagggcagccgtggctcagtgaaagatagaacacagcaaggctttcctacagtaaagctggaaggccataatgaacctgtagtgttgcaagtgtttgtgggcaacgactctggacgagtgaaaccacatggattttatcaggcctgcagagtaactggacgaaatacaactccttgcaaagaagtggacattgaaggcactactgttatagaagtcggccttgatcctagcaacaacatgacactggcggtggactgcgtagggatattgaaattgaggaatgctgatgtcgaagccagaataggaattgctggttccaagaagaaaagcactcgtgccagattggtttttcgagttaatatcatgaggaaagatggctccactttgacactgcaaacaccctcttctccaattttgtgtactcagccagcaggagtgccagaaatcttaaagaaaagcttgcatagctgttcagtgaaaggagaagaagaagtgtttttaatcggcaagaactttctgaaaggaactaaagttattttccaagaaaatgtttctgatgaaaactcttggaagtcagaagctgaaattgatatggaactatttcatcagaatcatcttattgtgaaggttcctccctatcatgaccaacatataactttgcctgtgtcagtgggaatatatgtagtgacaaatgctggaagatctcatgatgttcaaccattcacttacactccagacccagcagcagctggtgctttgaatgtaaatgtgaagaaggaaatatctagtccagcaagaccttgctcttttgaagaggccatgaaagcaatgaaaactactggatgtaatttagataaggtaaatattatccctaatgccctgatgactccactcataccaagcagtatgattaagagtgaagatgttactccaatggaagtaacagcagaaaaaagatcttccactatttttaagactacaaagtctgttggatcaactcagcaaacattagaaaacatctcaaacatagcaggaaatggctctttttcatcaccatcatcttcccacctaccttctgaaaatgaaaaacagcagcagattcagcccaaggcatacaacccagagaccctgacaactattcaaacccaggacatctcacagcctggtacttttccagcagtttctgcttctagtcagctgcccaacagcgatgcactattgcagcaggctacacagtttcagacaagagaaactcagtctagagagatattacagtcagatggtacagtggttaatttgtcacaactgactgaggcatcacaacaacagcagcagtcaccactacaagaacaagcacagactttacagcagcagatttcatcaaatatttttccatcaccaaatagtgtgagtcagcttcagaatactattcagcagctgcaagcagggagtttcacaggcagtactgctagtggcagcagtggaagtgttgacttggtccaacaagttttagaggcacagcagcagttatcttcagttttattttctgctccagatggtaatgagaatgttcaagagcagcttagtgcagatatttttcaacaagtcagtcaaattcagagtggtgtaagccctggaatgttttcctcaacagagccaacagtccataccagaccagataatttattacctggaagagctgaaagtgttcatccacagtctgaaaacacgttatctaatcaacagcagcagcagcagcagcaacagcaagtgatggaatcttcagccgcaatggtgatggagatgcaacagagtatctgccaggcagctgcccagattcagtcagagttattcccttcaactgcttcagcaaatggaaaccttcagcaatcgccagtttaccagcagacttctcacatgatgagtgcattgtctaccaatgaggatatgcaaatgcagtgtgaattgttttcttctcctcctgcagtttctggaaatgaaacttctacaactaccacacagcaggttgcaacccctggcactaccatgtttcagacatcaagttcaggagatggagaagaaactggaacacaagcaaaacagattcagaacagtgtctttcagaccatggtccaaatgcaacatagtggggacaatcaacctcaagttaaccttttttcatccacaaaaagtatgatgagtgttcagaatagtggtacccaacaacaaggtaatggtttattccagcaagggaatgagatgatgtcacttcaatctggaaattttttgcagcagtcttctcattcacaggcccaactttttcatcctcaaaatcctattgccgatgctcagaacctttcccaggaaactcaaggttctctctttcatagtccaaatcctattgtccacagtcagacttctacaacctcctctgaacaaatgcagcctccaatgtttcactctcaaagtaccattgctgtgttacagggctcttcagttcctcaagaccagcagtcaaccaacatatttctttcccagagtcccatgaataatcttcagactaacacagtagcccaagaagcattttttgcagcaccgaactcaatttctccacttcagtcaacatcaaacagtgaacaacaagctgctttccaacagcaagctccaatatcacacatccagactcctatgctttcccaagaacaggcacaacccccgcagcagggtttatttcagcctcaggtggccctgggctcccttccacctaatccaatgcctcaaagccaacaaggaaccatgttccagtcacagcactcaatagttgccatgcagagtaactctccatcccaggaacagcagcagcagcagcaacagcagcagcaacagcagcagcaacaacaacagagcattttattcagtaatcagaataccatggctacaatggcgtctccaaagcaaccaccaccaaacatgatattcaacccaaatcaaaatccaatggctaatcaggagcaacagaaccagtcaatttttcaccaacaaagtaacatggccccaatgaatcaagagcaacagcccatgcaatttcagagtcagtccacagtttcctcacttcagaacccaggtcctacccagtcggaatcatcacagacccccttgttccatagctctcctcagattcagttggtacaagggtcacctagttctcaagagcagcaagtaactctcttcttatctccagcatccatgtctgccttgcagaccagtataaatcaacaagatatgcaacagtctcctctttattcccctcagaacaacatgcctggaattcaaggagccacatcttcgcctcaaccacaggctactttatttcacaacacagcaggaggcacaatgaaccaactgcagaattctcctggctcatctcagcagacatcaggaatgttcttatttggcattcaaaataactgtagtcagcttttaacctctggaccagctacattgcctgatcagttgatggccataagtcagccaggccaaccacaaaacgagggccagccacctgtgacaacacttctttctcagcaaatgccagagaattctccactggcatcctctataaacaccaaccagaacatcgaaaagattgatttgcttgtttcattgcaaaaccaagggaacaacttgactggctccttttaa

SEQ ID NO: 1524 - RNA, 51 nt, Homo sapiens
  misc_feature 1..51: note = Homo sapiens__O94916-2__NFAT5(1-17) CDS wt
  source 1..51: mol_type = mRNA
atgggcggtgcttgcagctcctttaccacctcttccagccctaccatttat

SEQ ID NO: 1525 - RNA, 4368 nt, synthetic construct
  misc_feature 1..4368: note = Homo sapiens__O94916-2__NFAT5 CDS wt mod
  source 1..4368: mol_type = other RNA
atgggcggtgcttgcagctcctttaccacctcttccagccctaccatttattctacctcagtcaccgacagcaaggctatgcaagtggagagctgctcctcagccgtgggggtaagtaacagaggggtaagtgaaaagcagttaaccagtaacacagttcagcagcatccatcaacaccgaagaggcacacagtcttgtacatctcaccaccacctgaggacttgctggataacagtcggatgtcctgccaggatgaggggtgtggattggaatctgagcagagctgcagtatgtggatggaggattccccctccaacttcagtaacatgagcaccagttcctacaatgataacactgaggtacctcgtaaatcacgaaaacgaaatccaaagcagaggccgggggtcaaacgacgagattgtgaagaatctaatatggatatatttgatgccgacagtgccaaagcacctcactatgtgctttctcagcttaccacggacaacaaaggcaactcaaaagcgggaaatggaacattggaaaaccaaaaaggaactggagtaaagaaaagccctatgttgtgtggacaatatcctgttaaaagtgagggaaaggagctgaagatagttgtacaacctgagacacagcaccgagctcggtacctgactgagggcagccgtggctcagtgaaagatagaacacagcaaggctttcctacagtaaagctggaaggccataatgaacctgtagtgttgcaagtgtttgtgggcaacgactctggacgagtgaaaccacatggattttatcaggcctgcagagtaactggacgaaatacaactccttgcaaagaagtggacattgaaggcactactgttatagaagtcggccttgatcctagcaacaacatgacactggcggtggactgcgtagggatattgaaattgaggaatgctgatgtcgaagccagaataggaattgctggttccaagaagaaaagcactcgtgccagattggtttttcgagttaatatcatgaggaaagatggctccactttgacactgcaaacaccctcttctccaattttgtgtactcagccagcaggagtgccagaaatcttaaagaaaagtttgcatagctgttcagtgaaaggagaagaagaagtgtttttaatcggcaagaactttctgaaaggaactaaagttattttccaagaaaatgtttctgatgaaaactcttggaagtcagaagctgaaattgatatggaactatttcatcagaatcatcttattgtgaaggttcctccctatcatgaccaacatataactttgcctgtgtcagtgggaatatatgtagtgacaaatgctggaagatctcatgatgttcaaccattcacttacactccagacccagcagcagctggtgctttgaatgtaaatgtgaagaaggaaatatctagtccagcaagaccttgctcttttgaagaggccatgaaagcaatgaaaactactggatgtaatttagataaggtaaatattatccctaatgccctgatgactccactcataccaagcagtatgattaagagtgaagatgttactccaatggaagtaacagcagagaaaagatcttccactatttttaagactacaaagtctgttggatcaactcagcaaacattagaaaacatctcaaacatagcaggaaatggctctttttcatcaccatcatcttcccacctaccttctgaaaatgaaaaacagcagcagattcagcccaaggcatacaacccagagaccctgacaactattcaaacccaggacatctcacagcctggtacttttccagcagtttctgcttctagtcagctgcccaacagcgatgcactattgcagcaggctacacagtttcagacaagagaaactcagtctagagagatattacagtcagatggtacagtggttaatttgtcacaactgactgaggcatcacaacaacagcagcagtcaccactacaagaacaagcacagactttacagcagcagatttcatcaaatatttttccatcaccaaatagtgtgagtcagcttcagaatactattcagcagctgcaagcagggagtttcacaggcagtactgctagtggcagcagtggaagtgttgacttggtccaacaagttttagaggcacagcagcagttatcttcagttttattttctgctccagatggtaatgagaatgttcaagagcagcttagtgcagatatttttcaacaagtcagtcaaattcagagtggtgtaagccctggaatgttttcctcaacagagccaacagtccataccagaccagataatttattacctggaagggctgaaagtgttcatccacagtctgaaaacacgttatctaatcaacagcagcagcagcagcagcaacagcaagtgatggaatcttcagccgcaatggtgatggagatgcaacagagtatctgccaggcagctgcccagattcagtcagagttattcccttcaactgcttcagcaaatggaaaccttcagcaatcgccagtttaccagcagacttctcacatgatgagtgcattgtctaccaatgaggatatgcaaatgcagtgtgaattgttttcttctcctcctgcagtttctggaaatgaaacttctacaactaccacacagcaggttgcaacccctggcactaccatgtttcagacatcaagttcaggagatggagaagaaactggaacacaagcaaaacagattcagaacagtgtctttcagaccatggtccaaatgcaacatagtggggacaatcaacctcaagttaaccttttctcatccacaaaaagtatgatgagtgttcagaatagtggtacccaacaacaaggtaatggtttattccagcaagggaatgagatgatgtcacttcaatctggaaatttcttgcagcagtcttctcattcacaggcccaactttttcatcctcaaaatcctattgccgatgctcagaacctttcccaggaaactcaaggttctctctttcatagtccaaatcctattgtccacagtcagacttctacaacctcctctgaacaaatgcagcctccaatgtttcactctcaaagtaccattgctgtgttacagggctcctcagttcctcaagaccagcagtcaaccaacatatttctttcccagagtcccatgaataatcttcagactaacacagtagcccaagaagcattttttgcagcaccgaactcaatttctccacttcagtcaacatcaaacagtgaacaacaagctgctttccaacagcaagctccaatatcacacatccagactcctatgctttcccaagaacaggcacaacccccgcagcagggtttatttcagcctcaggtggccctgggctcccttccacctaatccaatgcctcaaagccaacaaggaaccatgttccagtcacagcactcaatagttgccatgcagagtaactctccatcccaggaacagcagcagcagcagcaacagcagcagcaacagcagcagcaacaacaacagagcattttattcagtaatcagaataccatggctacaatggcgtctccaaagcaaccaccaccaaacatgatattcaacccaaatcaaaatccaatggctaatcaggagcaacagaaccagtcaatttttcaccaacaaagtaacatggccccaatgaatcaagagcaacagcccatgcaatttcagagtcagtccacagtttcctcacttcagaacccaggtcctacccagtcggaatcatcacagacccccttgttccatagctctcctcagattcagttggtacaagggtcacctagttctcaagagcagcaagtaactctcttcttatctccagcatccatgtctgccttgcagaccagtataaatcaacaagatatgcaacagtctcctctttattcccctcagaacaacatgcctggaatccaaggagccacatcttcgcctcaaccacaggctactttatttcacaacacagcaggaggcacaatgaaccaactgcagaactctcctggctcatctcagcagacatcaggaatgttcttatttggcattcaaaataactgtagtcagcttttaacctctggaccagctacattgcctgatcagttgatggccataagtcagccaggccaaccacaaaacgagggccagccacctgtgacaacacttctttctcagcaaatgccagagaactctccactggcatcctctataaacaccaaccagaacatcgaaaagattgatttgcttgtttcattgcaaaaccaagggaacaacttgactggctccttttaa

SEQ ID NO: 1526 - RNA, 51 nt, synthetic construct; identical to SEQ ID NO: 1524
  misc_feature 1..51: note = Homo sapiens__O94916-2__NFAT5(1-17) CDS wt mod
  source 1..51: mol_type = other RNA

SEQ ID NO: 1527 - RNA, 4368 nt, synthetic construct
  misc_feature 1..4368: note = Homo sapiens__O94916-2__NFAT5 CDS opt1
  source 1..4368: mol_type = other RNA
atgggcggggcctgcagctccttcaccaccagctccagccccacgatctactccaccagcgtgaccgactccaaggccatgcaggtcgagagctgctccagcgcggtgggcgtgtccaaccgcggggtcagcgagaagcagctgacctccaacacggtgcagcagcacccgagcacccccaagcggcacaccgtgctctacatctccccgcccccggaggacctgctggacaacagccgcatgtcctgccaggacgagggctgcgggctcgagagcgagcagtcctgcagcatgtggatggaggacagcccctccaacttcagcaacatgtccaccagctcctacaacgacaacacggaggtcccccggaagtcccgcaagcggaaccccaagcagcgcccgggcgtgaagcggcgcgactgcgaggagtccaacatggacatcttcgacgccgacagcgccaaggcgccccactacgtgctgtcccagctgaccaccgacaacaagggcaacagcaaggccgggaacggcaccctcgagaaccagaaggggacgggcgtcaagaagtcccccatgctgtgcgggcagtaccccgtgaagtccgagggcaaggagctgaagatcgtggtccagccggagacccagcaccgggcgcgctacctcaccgagggctcccgggggagcgtgaaggaccgcacccagcagggcttccccacggtgaagctggaggggcacaacgagcccgtcgtgctgcaggtgttcgtcggcaacgactccggccgggtgaagccccacgggttctaccaggcctgccgcgtgaccggccggaacaccaccccgtgcaaggaggtcgacatcgaggggacgaccgtgatcgaggtgggcctcgaccccagcaacaacatgaccctggccgtcgactgcgtggggatcctgaagctccgcaacgccgacgtcgaggcgcggatcggcatcgccggctccaagaagaagtccacccgcgcccggctggtgttccgcgtgaacatcatgcggaaggacgggtccacgctgaccctccagacccccagcagccccatcctgtgcacccagccggccggcgtccccgagatcctgaagaagtccctccacagctgctccgtgaagggggaggaggaggtgttcctgatcggcaagaacttcctgaaggggacgaaggtcatcttccaggagaacgtgagcgacgagaactcctggaagtccgaggccgagatcgacatggagctgttccaccagaaccacctgatcgtgaaggtcccgccctaccacgaccagcacatcaccctgcccgtgtccgtgggcatctacgtcgtgaccaacgcgggccgcagccacgacgtgcagcccttcacctacacgcccgaccccgccgccgccggggccctcaacgtcaacgtgaagaaggagatctccagcccggcgcgcccctgctccttcgaggaggccatgaaggccatgaagaccaccggctgcaacctggacaaggtgaacatcatccccaacgccctgatgaccccgctcatccccagctccatgatcaagagcgaggacgtcacgcccatggaggtgaccgccgagaagcggtccagcaccatcttcaagaccaccaagtccgtggggagcacgcagcagaccctggagaacatcagcaacatcgcgggcaacgggtccttcagctcccccagctccagccacctgccgtccgagaacgagaagcagcagcagatccagcccaaggcctacaaccccgagaccctcaccacgatccagacccaggacatcagccagcccggcaccttcccggccgtctccgccagctcccagctgcccaacagcgacgccctgctccagcaggcgacccagttccagacgcgcgagacccagtcccgggagatcctgcagagcgacggcaccgtggtgaacctgtcccagctcaccgaggccagccagcagcagcagcagtccccgctgcaggagcaggcccagacgctgcagcagcagatcagctccaacatcttccccagccccaacagcgtctcccagctccagaacaccatccagcagctgcaggccgggagcttcaccggctccaccgcgagcgggtccagcggctccgtggacctggtgcagcaggtcctcgaggcccagcagcagctgagctccgtgctgttcagcgcccccgacggcaacgagaacgtgcaggagcagctgtccgccgacatcttccagcaggtcagccagatccagtccggggtgagccccggcatgttctccagcacggagcccaccgtgcacacccgcccggacaacctcctgcccgggcgggccgagtccgtccacccccagagcgagaacaccctgtccaaccagcagcagcagcagcagcagcagcagcaggtgatggagagcagcgcggccatggtgatggagatgcagcagtccatctgccaggccgccgcccagatccagagcgagctgttcccctccacggcgagcgccaacggcaacctgcagcagtccccggtctaccagcagaccagccacatgatgtccgccctgagcaccaacgaggacatgcagatgcagtgcgagctgttctccagcccgcccgccgtgtccgggaacgagaccagcacgaccaccacccagcaggtggccacgcccggcaccaccatgttccagacctccagctccggcgacggggaggagacgggcacccaggcgaagcagatccagaacagcgtcttccagaccatggtgcagatgcagcactccggggacaaccagccccaggtgaacctgttcagctccaccaagagcatgatgagcgtccagaactccggcacgcagcagcaggggaacggcctgttccagcagggcaacgagatgatgagcctccagtccgggaacttcctgcagcagagctcccacagccaggcccagctgttccacccccagaaccccatcgccgacgcccagaacctctcccaggagacccagggcagcctgttccactccccgaaccccatcgtgcacagccagacctccaccaccagctccgagcagatgcagccgcccatgttccacagccagtccacgatcgcggtgctgcaggggagctccgtcccccaggaccagcagagcaccaacatcttcctctcccagagccccatgaacaacctgcagaccaacaccgtggcccaggaggccttcttcgccgcccccaacagcatctccccgctgcagagcacgtccaacagcgagcagcaggcggccttccagcagcaggcccccatctcccacatccagacccccatgctcagccaggagcaggcccagccgccccagcagggcctgttccagccccaggtggccctggggtccctcccgcccaaccccatgccccagagccagcagggcaccatgttccagtcccagcacagcatcgtcgcgatgcagtccaacagcccctcccaggagcagcagcagcagcagcagcagcagcagcagcagcagcagcagcagcagcagagcatcctgttctccaaccagaacaccatggccacgatggccagccccaagcagcccccgcccaacatgatcttcaaccccaaccagaaccccatggccaaccaggagcagcagaaccagtccatcttccaccagcagagcaacatggccccgatgaaccaggagcagcagcccatgcagttccagtcccagagcaccgtgagctccctgcagaaccccggccccacccagagcgagtccagccagaccccgctgttccactccagcccccagatccagctggtgcaggggtcccccagctcccaggagcagcaggtcacgctgttcctcagccccgcgtccatgagcgccctgcagacctccatcaaccagcaggacatgcagcagagccccctgtactccccgcagaacaacatgcccggcatccagggggccaccagctccccgcagccccaggccaccctcttccacaacacggcgggcgggaccatgaaccagctgcagaacagccccggcagctcccagcagaccagcggcatgttcctgttcgggatccagaacaactgctcccagctcctgaccagcggccccgccacgctgccggaccagctcatggccatctcccagcccgggcagccccagaacgagggccagcccccggtgaccaccctgctgtcccagcagatgcccgagaacagccccctcgccagctccatcaacaccaaccagaacatcgagaagatcgacctgctggtcagcctccagaaccagggcaacaacctgacggggtccttctga

SEQ ID NO: 1528 - RNA, 51 nt, synthetic construct
  misc_feature 1..51: note = Homo sapiens__O94916-2__NFAT5(1-17) CDS opt1
  source 1..51: mol_type = other RNA
atgggcggggcctgcagctccttcaccaccagctccagccccacgatctac

SEQ ID NO: 1529 - RNA, 4368 nt, synthetic construct
  misc_feature 1..4368: note = Homo sapiens__O94916-2__NFAT5 CDS opt1
  source 1..4368: mol_type = other RNA
atgggcggggcctgcagctccttcaccaccagctccagccccacgatctactccaccagcgtgaccgactccaaggccatgcaggtcgagagctgctccagcgcggtgggcgtgtccaaccgcggggtcagcgagaagcagctgacctccaacacggtgcagcagcacccgagcacccccaagcggcacaccgtgctctacatctccccccccccggaggacctgctggacaacagccgcatgtcctgccaggacgagggctgcgggctcgagagcgagcagtcctgcagcatgtggatggaggacagcccctccaacttcagcaacatgtccaccagctcctacaacgacaacacggaggtcccccggaagagccgcaagcggaaccccaagcagcgcccgggcgtgaagcggcgcgactgcgaggagtccaacatggacatcttcgacgccgacagcgccaaggccccccactacgtgctgtcccagctgaccaccgacaacaagggcaacagcaaggccgggaacggcaccctcgagaaccagaaggggacgggcgtcaagaagtcccccatgctgtgcgggcagtaccccgtgaagagcgagggcaaggagctgaagatcgtggtccagccggagacccagcaccgggcgcgctacctcaccgagggctcccgggggagcgtgaaggaccgcacccagcagggcttccccacggtgaagctggaggggcacaacgagcccgtcgtgctgcaggtgttcgtcggcaacgactccggccgggtgaagccccacgggttctaccaggcctgccgcgtgaccggccggaacaccaccccgtgcaaggaggtcgacatcgaggggacgaccgtgatcgaggtgggcctcgaccccagcaacaacatgaccctggccgtcgactgcgtggggatcctgaagctccgcaacgccgacgtcgaggcgcggatcggcatcgccggctccaagaagaagagcacccgcgcccggctggtgttccgcgtgaacatcatgcggaaggacgggtccacgctgaccctccagacccccagcagccccatcctgtgcacccagccggccggcgtccccgagatcctgaagaagtccctccacagctgctccgtgaagggggaggaggaggtgttcctgatcggcaagaacttcctgaaggggacgaaggtcatcttccaggagaacgtgagcgacgagaactcctggaagagcgaggccgagatcgacatggagctcttccaccagaaccacctgatcgtgaaggtccccccctaccacgaccagcacatcaccctgccggtgtccgtgggcatctacgtcgtgaccaacgcgggccgcagccacgacgtgcagcccttcacctacacgcccgaccccgccgccgccggggccctcaacgtcaacgtgaagaaggagatctccagcccggcgcgcccctgctccttcgaggaggccatgaaggccatgaagaccaccggctgcaacctggacaaggtgaacatcatccccaacgccctgatgaccccgctcatccccagctccatgatcaagagcgaggacgtcacgcccatggaggtgaccgccgagaagcggtccagcaccatcttcaagaccaccaagtccgtggggagcacgcagcagaccctggagaacatcagcaacatcgcgggcaacgggtccttcagctcccccagctccagccacctgccgtccgagaacgagaagcagcagcagatccagcccaaggcctacaaccccgagaccctcaccacgatccagacccaggacatcagccagcccggcaccttcccggccgtctccgccagctcccagctgcccaacagcgacgccctgctccagcaggcgacccagttccagacgcgcgagacccagtcccgggagatcctgcagagcgacggcaccgtggtgaacctgtcccagctcaccgaggccagccagcagcagcagcagtcccccctgcaggagcaggcccagacgctgcagcagcagatcagctccaacatcttccccagcccgaacagcgtctcccagctccagaacaccatccagcagctgcaggccgggagcttcaccggctccaccgcgagcgggtccagcggctccgtggacctggtgcagcaggtcctcgaggcccagcagcagctgagctccgtgctgttcagcgcccccgacggcaacgagaacgtgcaggagcagctgtccgccgacatcttccagcaggtcagccagatccagtccggggtgagccccggcatgttctccagcacggagcccaccgtgcacacccgcccggacaacctcctgcccgggcgggccgagtccgtccacccccagagcgagaacaccctgtccaaccagcagcagcagcagcagcagcagcagcaggtgatggagagcagcgcggccatggtgatggagatgcagcagtccatctgccaggccgccgcccagatccagagcgagctcttcccctccacggcgagcgccaacggcaacctgcagcagtccccggtctaccagcagaccagccacatgatgtccgccctgagcaccaacgaggacatgcagatgcagtgcgagctcttctccagcccccccgccgtgtccgggaacgagaccagcacgaccaccacccagcaggtggccacgcccggcaccaccatgttccagacctccagctccggcgacggggaggagacgggcacccaggcgaagcagatccagaacagcgtcttccagaccatggtgcagatgcagcactccggggacaaccagccgcaggtgaacctgttcagctccaccaagagcatgatgagcgtccagaactccggcacgcagcagcaggggaacggcctgttccagcagggcaacgagatgatgagcctccagtccgggaacttcctgcagcagagctcccacagccaggcccagctgttccacccccagaaccccatcgccgacgcccagaacctctcccaggagacccagggcagcctgttccactccccgaaccccatcgtgcacagccagacctccaccaccagctccgagcagatgcagccccccatgttccacagccagtccacgatcgcggtgctgcaggggagctccgtcccgcaggaccagcagagcaccaacatcttcctctcccagagccccatgaacaacctgcagaccaacaccgtggcccaggaggccttcttcgccgcccccaacagcatctcccccctgcagagcacgtccaacagcgagcagcaggcggccttccagcagcaggccccgatctcccacatccagacccccatgctcagccaggagcaggcccagcccccccagcagggcctgttccagccgcaggtggccctggggtccctcccccccaaccccatgccgcagagccagcagggcaccatgttccagtcccagcacagcatcgtcgcgatgcagtccaacagcccctcccaggagcagcagcagcagcagcagcagcagcagcagcagcagcagcagcagcagcagagcatcctgttctccaaccagaacaccatggccacgatggccagccccaagcagcccccgcccaacatgatcttcaaccccaaccagaaccccatggccaaccaggagcagcagaaccagtccatcttccaccagcagagcaacatggccccgatgaaccaggagcagcagcccatgcagttccagtcccagagcaccgtgagctccctgcagaaccccggccccacccagagcgagtccagccagaccccgctcttccactccagcccccagatccagctggtgcaggggtcccccagctcccaggagcagcaggtcacgctgttcctcagcccggcgtccatgagcgccctgcagacctccatcaaccagcaggacatgcagcagagccccctgtactccccccagaacaacatgcccggcatccagggggccaccagctccccgcagccccaggccaccctcttccacaacacggcgggcgggaccatgaaccagctgcagaacagccccggcagctcccagcagaccagcggcatgttcctgttcgggatccagaacaactgctcccagctcctgaccagcggccccgccacgctgccggaccagctcatggccatctcccagcccgggcagccccagaacgagggccagcccccggtgaccaccctgctgagccagcagatgcccgagaactcccccctcgccagctccatcaacaccaaccagaacatcgagaagatcgacctgctggtcagcctccagaaccagggcaacaacctgacggggtccttctga

SEQ ID NO: 1530 - RNA, 51 nt, synthetic construct; identical to SEQ ID NO: 1528
  misc_feature 1..51: note = Homo sapiens__O94916-2__NFAT5(1-17) CDS opt1
  source 1..51: mol_type = other RNA

SEQ ID NO: 1531 - RNA, 4368 nt, synthetic construct
  misc_feature 1..4368: note = Homo sapiens__O94916-2__NFAT5 CDS opt3
  source 1..4368: mol_type = other RNA
atgggcggagcctgtagcagctttaccacaagcagcagccccaccatctacagcaccagcgtgacagacagcaaggccatgcaggtcgagagctgttcttctgccgtgggcgtgtccaatagaggcgtgtccgagaagcagctgaccagcaataccgtgcagcagcaccccagcacacccaagagacacaccgtgctgtacatcagccctccacctgaggacctgctggacaacagcagaatgagctgccaggatgaaggctgcggcctggaaagcgagcagagctgtagtatgtggatggaagatagccccagcaacttcagcaacatgagcaccagcagctacaacgacaacaccgaggtgcccagaaagagccggaagagaaaccccaaacagcggcctggcgtgaagcggagagattgcgaggaatccaacatggacatcttcgacgccgacagcgccaaggctcctcactatgttctgagccagctgactaccgacaacaagggcaatagcaaggccggcaacggcaccctggaaaaccagaaaggcaccggcgtgaagaaaagccccatgctgtgtggacagtaccccgtgaagtccgagggcaaagaactgaagatcgtggtgcagcccgagacacagcacagagccagatacctgacagagggcagcagaggcagcgtgaaggatagaacccagcagggcttccccaccgtgaagctggaaggacacaatgagcctgtggtgctccaggtgttcgtgggcaatgatagcggcagagtgaagccccacggcttctatcaggcctgcagagtgaccggcagaaacaccacaccttgcaaagaggtggacatcgagggcaccaccgtgatcgaagttggcctggatcctagcaacaacatgaccctggccgtggactgtgtgggcatcctgaagctgagaaacgccgacgtggaagccagaatcggaatcgccggcagcaagaagaagtccaccagagccaggctggtgttcagagtgaacatcatgcggaaggacggcagcaccctgacactgcagacaccttctagccctatcctgtgcacacagcctgctggcgtgcccgagatcctgaagaagtctctgcacagctgctccgtgaagggcgaagaggaagtgttcctgatcggcaagaacttcctgaagggcaccaaagtgatcttccaagagaacgtgtccgacgagaacagctggaagtctgaggccgagatcgacatggaactgttccaccagaaccacctgatcgtgaaggtgccaccttaccacgaccagcacatcaccctgcctgtgtccgtgggcatctacgtggtcaccaatgccggcagatcccacgacgtgcagcccttcacatacacccctgatcctgctgctgctggcgccctgaatgtgaacgtcaagaaagagatcagcagccctgccagaccttgcagcttcgaagaggccatgaaggctatgaagaccaccggctgcaacctggacaaagtgaatatcatccccaacgctctgatgacccctctgatccccagctccatgatcaagagcgaggacgtgacccctatggaagtgaccgccgagaagagaagctccaccatcttcaagaccaccaagagcgtgggcagcacacagcagacactggaaaacatcagcaatatcgccggaaacggcagcttcagctcccctagcagtagccatctgcctagcgagaacgagaaacagcagcagattcagcccaaggcctacaatcccgagactctgaccaccatccagacacaggacatcagccagccaggcacctttcctgccgtgtctgcttcttcccagctgcctaactctgacgccctgctgcaacaggccacacagttccagaccagagagacacagagcagagagatcctgcagtccgacggcaccgtggtcaatctgtctcagctgaccgaagcctctcagcagcaacagcaaagccctctgcaagagcaggcccagacactccagcagcaaatctccagcaacatcttcccatctccaaatagcgtcagccagctgcagaataccatccagcagctccaggccggctcctttactggctctacagcctctggctctagcggctctgtggacctggttcagcaggttctggaagcccaacagcagctgtcctccgtgctgttttctgctcccgacggcaacgagaacgtccaagagcaactgagcgccgacatcttccagcaagtgtcccagatccagagcggcgtgtcccctggcatgtttagctctaccgagcctaccgtgcacacccggcctgataatctgcttcctggcagagccgagagcgtgcaccctcagtctgagaacaccctgagcaatcaacaacaacagcaacagcagcaacaacaagtgatggaaagcagcgccgccatggtcatggaaatgcagcagtccatctgccaggctgccgctcagatccagtccgagctgtttcctagcaccgccagcgccaatggcaatctgcagcagagccctgtgtaccagcagaccagccacatgatgagcgccctgagcaccaacgaggacatgcagatgcagtgcgaactgtttagcagcccaccagccgtgtccggcaatgagacaagcaccaccacaacacagcaggtcgccacacctggcaccaccatgtttcagacaagcagctctggcgacggcgaggaaactggaacacaggccaaacagattcagaacagcgtgttccagacaatggtccagatgcagcacagcggcgacaaccagcctcaagtgaacctgttctccagcaccaagtccatgatgtccgtgcagaatagcggcacccagcaacaaggcaacggactctttcagcagggaaacgagatgatgagcctgcagtctggcaacttcctccagcagtctagccactctcaggcccagctgtttcaccctcaaaaccctatcgccgacgctcagaacctgagccaagaaacacagggcagcctgtttcacagccccaatcctatcgtgcacagccagaccagcaccacatccagcgaacagatgcaacctcctatgttccacagccagtccacaatcgccgtgctgcagggatcaagcgtgccacaggatcagcaaagcaccaacatctttctcagtcagagccccatgaacaacctgcagaccaacacagtggcccaagaggccttcttcgccgctcctaatagcatctccccactgcagtccacctccaactctgagcagcaggcagccttccaacagcaagctcccatcagccacattcagaccccaatgctgtcccaagaacaggctcagcctccacagcagggactgttccagccacaagtggctctgggaagcctgcctcctaatcctatgcctcagtctcagcagggcacaatgtttcagtcccagcacagcatcgtggctatgcagagcaacagccccagccaagaacagcaacaacagcagcaacagcaacagcaacaacaacaacagcagcaacagagcatcctgttcagcaaccagaacaccatggccacaatggctagccccaagcagcctcctccaaacatgatcttcaaccccaatcagaacccgatggccaatcaagagcagcagaaccagtccatattccaccagcagagcaatatggccccgatgaatcaagaacaacaacccatgcagtttcagagccagtctaccgtgtccagcctgcagaaccctggacctacacagagcgagtccagccagacaccactgttccatagctccccacagatccagctggtgcagggctctcctagctctcaagagcaacaagtgaccctgtttctgagccccgccagcatgtctgccctgcagacatccatcaaccagcaggatatgcagcaatcccctctgtacagccctcagaacaacatgcctggaatccagggcgctaccagctctcctcaacctcaggccactctgttccacaataccgctggcggcaccatgaaccagctccagaacagccctggaagcagccagcagacaagcggcatgttcctgttcggtatccagaacaactgctctcagctgctgacctccggacctgccacactgcctgatcagctcatggccatctctcagcctggccagcctcagaatgaaggccagccacctgtgaccacactgctcagtcagcagatgcccgagaatagccctctggcctccagcatcaacaccaaccagaatatcgagaagatcgacctcctggtgtctctgcagaatcagggcaacaatctgacaggcagcttctga

SEQ ID NO: 1532 - RNA, 51 nt, synthetic construct
  misc_feature 1..51: note = Homo sapiens__O94916-2__NFAT5(1-17) CDS opt3
  source 1..51: mol_type = other RNA
atgggcggagcctgtagcagctttaccacaagcagcagccccaccatctac

SEQ ID NO: 1533 - RNA, 4368 nt, synthetic construct
  misc_feature 1..4368: note = Homo sapiens__O94916-2__NFAT5 CDS opt3
  source 1..4368: mol_type = other RNA
atgggcggggcctgcagctccttcaccacatcttcaagtcccactatctacagcacgtccgtgaccgactctaaggctatgcaggtcgagtcgtgttcaagcgcagttggagtgagtaacagaggtgtatccgaaaaacaactgacatctaatactgtgcagcagcaccctagcaccccaaagaggcatacagtcctctatatttccccgccccctgaggatcttctggacaactcacggatgagttgccaggatgaaggctgtgggttggagagcgaacaatcttgctccatgtggatggaggactcaccaagcaattttagtaacatgtctacctccagctacaatgataacactgaggtgccccgcaaatcgcgaaagcgtaatcctaaacagagaccaggagttaagaggcgggactgtgaagagtctaacatggatatattcgacgccgattccgcgaaggctccccactatgtgttatcacagctgacaaccgacaataaaggcaacagtaaggccggtaatgggacgctagaaaaccagaaaggaactggcgtcaagaaaagccctatgctctgcggccaatacccagtgaagtccgaggggaaggagctgaaaatcgtagttcagccggaaacccagcatcgcgcaagatatcttacagagggatctaggggtagcgtgaaggatcggactcagcaaggctttcccaccgtcaaactggaagggcacaatgagcctgtggtgttgcaggtcttcgttggaaacgactcaggccgcgtgaagccacatggtttttaccaggcctgtcgagtaacagggagaaataccacgccctgcaaagaagtggatattgagggaactacagtcatcgaggtgggcctcgaccctagtaacaacatgaccctggctgttgactgtgtgggcattctgaagctcaggaatgcagatgtcgaagcccggatcgggatagctggatccaaaaagaaaagcactcgtgcccgcttagtgttcagagtaaacatcatgaggaaagacggttctacactgacccttcaaacgccatcaagtcccattttgtgcacccagccggcgggcgttcctgagatcctgaagaaaagcctacactcctgttctgtgaagggggaagaggaagtctttctcattggaaagaatttcctgaagggcacaaaggtgatctttcaggagaacgtctcggatgagaatagctggaaatccgaagcagagatagacatggaacttttccaccagaaccatctgattgtgaaggttcccccatatcacgatcaacatatcactttgcctgtgtcagtaggtatttacgtcgtgaccaatgccgggcggagtcacgacgttcagccctttacatacactccagatcccgctgccgcaggcgctctcaacgtgaatgtcaaaaaggagatctctagccctgcccgaccatgctccttcgaagaggcgatgaaagccatgaagaccacaggatgcaacctggacaaggtgaatatcattccgaacgcattaatgactcccctgataccttcaagcatgatcaaatctgaggatgtaaccccaatggaagtgacggctgagaagcgctccagtacaatttttaaaaccactaagagcgttggctctacccagcagacactcgaaaatatctccaacatagccgggaatggatcattcagtagcccctcgtcctctcaccttcctagcgagaacgagaaacaacagcagattcagccaaaggcttataaccccgaaaccctgactacaatccaaacgcaggacatctcacagccgggtaccttccctgccgtcagtgcatcctctcagttgccaaatagcgatgccctactgcaacaggctactcagtttcaaacaagagagacccagtccagggaaattctccagtcagacggcacagtggtgaacctgagccagcttactgaggcgagtcaacagcagcagcaatctcccctgcaggaacaggcacagaccttgcaacagcagatctccagcaatattttcccttcgcccaactcagtctctcaactccagaatacgatacagcagctgcaagccgggagttttaccggatccacagctagcggctctagcggttccgttgacttagtgcaacaggtgctggaggcccagcagcagctatcaagtgtactcttcagcgcaccagatgggaacgagaatgtccaggaacagctgtctgccgacatctttcaacaggtgtcccagattcagtcaggcgttagtcctggaatgttcagctccactgagcccaccgtgcatacacggccagataaccttttgccgggccgcgctgaatctgtccaccctcaatcggagaatactctgagcaaccagcagcaacagcagcagcaacagcaacaggtgatggaatcatccgccgcaatggttatggagatgcagcagagtatctgtcaggcggctgcccagatccaatctgagctctttcccagcaccgcatccgccaatgggaacctgcagcagtcaccagtgtaccaacagacgtctcatatgatgagcgctcttagtacaaatgaagacatgcagatgcagtgcgagctgttctcctcgccccctgccgtatctggaaacgaaacctcaactacaaccactcaacaggtcgcaaccccaggtacaacgatgtttcagacctccagtagcggcgatggggaggaaactggaacacaggctaagcaaattcaaaattcggtgttccagaccatggtgcagatgcagcactctggcgacaaccagccccaggtcaacttgttttccagcacaaaatcaatgatgagtgttcaaaattctggtactcagcagcaggggaacggcctcttccaacagggaaatgagatgatgtccctgcagagcggcaactttttacagcaatcaagtcatagccaggcccagctgttccaccctcagaatccgatagcggatgcccaaaacctatcccaggagacccaggggtctctcttccacagcccaaatcccatcgtgcattcccagacgtcaacaacctctagtgaacaaatgcagcctccaatgtttcactcgcagagcactattgctgtactgcaaggatcctctgtgccccaggaccagcagtcaaccaacatcttccttagccaatcccctatgaataacttgcagacaaatactgtcgcacaggaggcctttttcgctgccccgaacagtatttctcccctgcagagcacctcaaattccgaacaacaggcagcgtttcagcagcaagccccaatcagtcatatacagacacctatgctcagccaggagcaagctcagcccccacagcagggcctgttccaacctcaggtggccttaggttctctgcccccaaacccgatgcctcagtcccagcaagggacgatgtttcagtcacagcacagcatcgttgcaatgcagagcaattctcccagtcaagagcagcagcagcaacagcagcaacagcagcagcaacagcagcagcaacagcagtccattcttttcagcaaccagaacaccatggctactatggcctcaccaaagcaaccccctccaaatatgatctttaaccccaatcagaaccctatggcaaatcaggaacaacagaaccagtccattttccaccagcaatctaatatggccccgatgaaccaggagcagcagccaatgcaatttcagagccagagtacagtgtccagcttgcagaatcccggacctacccaatctgaatcaagtcagactcccctcttccattccagcccacagatccagctggtccaaggctctccttcgtcacaggagcagcaagtgacactatttctgagccccgcttccatgagtgcgctccagacctctataaaccagcaggatatgcaacagagcccactgtattcccctcagaataacatgccgggtattcagggcgccacgtcaagtccccaaccacaggcaactcttttccacaataccgctgggggaacaatgaaccagttgcaaaattctcctggcagctcccagcagacctcagggatgttcctgtttggaatccagaacaattgtagccaattactcacttctggccccgccacactgccagaccagcttatggccatttcccagcctggtcagccccaaaacgaagggcagccgccagttaccacactgttgagtcagcagatgcctgagaacagccccctcgcttcgtccatcaatactaaccaaaatatagagaaaatcgatctgctagtgtctctgcagaaccagggaaataacctcaccggctcattctga

SEQ ID NO: 1534 - RNA, 51 nt, synthetic construct
  misc_feature 1..51: note = Homo sapiens__O94916-2__NFAT5(1-17) CDS opt3
  source 1..51: mol_type = other RNA
atgggcggggcctgcagctccttcaccacatcttcaagtcccactatctac

SEQ ID NO: 1535 - RNA, 4368 nt, synthetic construct
  misc_feature 1..4368: note = Homo sapiens__O94916-2__NFAT5 CDS opt4
  source 1..4368: mol_type = other RNA
atgggcggcgcctgcagcagcttcaccaccagcagcagccccaccatctacagcaccagcgtgaccgacagcaaggccatgcaggtggagagctgcagcagcgccgtgggcgtgagcaacagaggcgtgagcgagaagcagctgaccagcaacaccgtgcagcagcaccccagcacccccaagagacacaccgtgctgtacatcagccccccccccgaggacctgctggacaacagcagaatgagctgccaggacgagggctgcggcctggagagcgagcagagctgcagcatgtggatggaggacagccccagcaacttcagcaacatgagcaccagcagctacaacgacaacaccgaggtgcccagaaagagcagaaagagaaaccccaagcagagacccggcgtgaagagaagagactgcgaggagagcaacatggacatcttcgacgccgacagcgccaaggccccccactacgtgctgagccagctgaccaccgacaacaagggcaacagcaaggccggcaacggcaccctggagaaccagaagggcaccggcgtgaagaagagccccatgctgtgcggccagtaccccgtgaagagcgagggcaaggagctgaagatcgtggtgcagcccgagacccagcacagagccagatacctgaccgagggcagcagaggcagcgtgaaggacagaacccagcagggcttccccaccgtgaagctggagggccacaacgagcccgtggtgctgcaggtgttcgtgggcaacgacagcggcagagtgaagccccacggcttctaccaggcctgcagagtgaccggcagaaacaccaccccctgcaaggaggtggacatcgagggcaccaccgtgatcgaggtgggcctggaccccagcaacaacatgaccctggccgtggactgcgtgggcatcctgaagctgagaaacgccgacgtggaggccagaatcggcatcgccggcagcaagaagaagagcaccagagccagactggtgttcagagtgaacatcatgagaaaggacggcagcaccctgaccctgcagacccccagcagccccatcctgtgcacccagcccgccggcgtgcccgagatcctgaagaagagcctgcacagctgcagcgtgaagggcgaggaggaggtgttcctgatcggcaagaacttcctgaagggcaccaaggtgatcttccaggagaacgtgagcgacgagaacagctggaagagcgaggccgagatcgacatggagctgttccaccagaaccacctgatcgtgaaggtgcccccctaccacgaccagcacatcaccctgcccgtgagcgtgggcatctacgtggtgaccaacgccggcagaagccacgacgtgcagcccttcacctacacccccgaccccgccgccgccggcgccctgaacgtgaacgtgaagaaggagatcagcagccccgccagaccctgcagcttcgaggaggccatgaaggccatgaagaccaccggctgcaacctggacaaggtgaacatcatccccaacgccctgatgacccccctgatccccagcagcatgatcaagagcgaggacgtgacccccatggaggtgaccgccgagaagagaagcagcaccatcttcaagaccaccaagagcgtgggcagcacccagcagaccctggagaacatcagcaacatcgccggcaacggcagcttcagcagccccagcagcagccacctgcccagcgagaacgagaagcagcagcagatccagcccaaggcctacaaccccgagaccctgaccaccatccagacccaggacatcagccagcccggcaccttccccgccgtgagcgccagcagccagctgcccaacagcgacgccctgctgcagcaggccacccagttccagaccagagagacccagagcagagagatcctgcagagcgacggcaccgtggtgaacctgagccagctgaccgaggccagccagcagcagcagcagagccccctgcaggagcaggcccagaccctgcagcagcagatcagcagcaacatcttccccagccccaacagcgtgagccagctgcagaacaccatccagcagctgcaggccggcagcttcaccggcagcaccgccagcggcagcagcggcagcgtggacctggtgcagcaggtgctggaggcccagcagcagctgagcagcgtgctgttcagcgcccccgacggcaacgagaacgtgcaggagcagctgagcgccgacatcttccagcaggtgagccagatccagagcggcgtgagccccggcatgttcagcagcaccgagcccaccgtgcacaccagacccgacaacctgctgcccggcagagccgagagcgtgcacccccagagcgagaacaccctgagcaaccagcagcagcagcagcagcagcagcagcaggtgatggagagcagcgccgccatggtgatggagatgcagcagagcatctgccaggccgccgcccagatccagagcgagctgttccccagcaccgccagcgccaacggcaacctgcagcagagccccgtgtaccagcagaccagccacatgatgagcgccctgagcaccaacgaggacatgcagatgcagtgcgagctgttcagcagcccccccgccgtgagcggcaacgagaccagcaccaccaccacccagcaggtggccacccccggcaccaccatgttccagaccagcagcagcggcgacggcgaggagaccggcacccaggccaagcagatccagaacagcgtgttccagaccatggtgcagatgcagcacagcggcgacaaccagccccaggtgaacctgttcagcagcaccaagagcatgatgagcgtgcagaacagcggcacccagcagcagggcaacggcctgttccagcagggcaacgagatgatgagcctgcagagcggcaacttcctgcagcagagcagccacagccaggcccagctgttccacccccagaaccccatcgccgacgcccagaacctgagccaggagacccagggcagcctgttccacagccccaaccccatcgtgcacagccagaccagcaccaccagcagcgagcagatgcagccccccatgttccacagccagagcaccatcgccgtgctgcagggcagcagcgtgccccaggaccagcagagcaccaacatcttcctgagccagagccccatgaacaacctgcagaccaacaccgtggcccaggaggccttcttcgccgcccccaacagcatcagccccctgcagagcaccagcaacagcgagcagcaggccgccttccagcagcaggcccccatcagccacatccagacccccatgctgagccaggagcaggcccagcccccccagcagggcctgttccagccccaggtggccctgggcagcctgccccccaaccccatgccccagagccagcagggcaccatgttccagagccagcacagcatcgtggccatgcagagcaacagccccagccaggagcagcagcagcagcagcagcagcagcagcagcagcagcagcagcagcagcagagcatcctgttcagcaaccagaacaccatggccaccatggccagccccaagcagcccccccccaacatgatcttcaaccccaaccagaaccccatggccaaccaggagcagcagaaccagagcatcttccaccagcagagcaacatggcccccatgaaccaggagcagcagcccatgcagttccagagccagagcaccgtgagcagcctgcagaaccccggccccacccagagcgagagcagccagacccccctgttccacagcagcccccagatccagctggtgcagggcagccccagcagccaggagcagcaggtgaccctgttcctgagccccgccagcatgagcgccctgcagaccagcatcaaccagcaggacatgcagcagagccccctgtacagcccccagaacaacatgcccggcatccagggcgccaccagcagcccccagccccaggccaccctgttccacaacaccgccggcggcaccatgaaccagctgcagaacagccccggcagcagccagcagaccagcggcatgttcctgttcggcatccagaacaactgcagccagctgctgaccagcggccccgccaccctgcccgaccagctgatggccatcagccagcccggccagccccagaacgagggccagccccccgtgaccaccctgctgagccagcagatgcccgagaacagccccctggccagcagcatcaacaccaaccagaacatcgagaagatcgacctgctggtgagcctgcagaaccagggcaacaacctgaccggcagcttctga

SEQ ID NO: 1536 - RNA, 51 nt, synthetic construct
  misc_feature 1..51: note = Homo sapiens__O94916-2__NFAT5(1-17) CDS opt4
  source 1..51: mol_type = other RNA
atgggcggcgcctgcagcagcttcaccaccagcagcagccccaccatctac

SEQ ID NO: 1537 - RNA, 4368 nt, synthetic construct
  misc_feature 1..4368: note = Homo sapiens__O94916-2__NFAT5 CDS opt5
  source 1..4368: mol_type = other RNA
atgggcggggcctgcagctccttcaccacatctagctcccccacgatctactctaccagcgtgacagactccaaggctatgcaggtcgagtcttgtagctccgccgttggagtgagcaacagaggcgtgtctgaaaaacaactgacctccaatacagtccagcagcaccctagcaccccgaagcggcatacagtgctctatatttctccccctcccgaggatctgcttgacaactcccgcatgagctgccaggatgaagggtgtggactggagtctgaacaatcctgcagcatgtggatggaggactccccttctaattttagcaacatgtccaccagctcttacaatgataacacggaggttcccagaaaatcccggaagcgcaatcctaaacagagaccgggcgtgaagcggcgcgactgtgaagagagcaacatggatatcttcgacgcggattctgctaaggctccccactatgtcctcagccagctgaccacagacaataaagggaactccaaggccggaaatggcacccttgaaaaccagaaaggcacaggggtgaagaaatctcctatgctgtgcggacaataccccgttaagagcgagggcaaggagctcaaaattgtggtccagcctgaaacccagcatagagctcggtatctgacggaggggtcccgcggaagcgtgaaggatagaacacagcaaggctttcccaccgtgaaactggaagggcacaatgagccggtcgttctccaggtgttcgtgggaaacgactctggccgggtcaagcctcatggcttttaccaggcctgtcgcgtgacagggagaaataccaccccctgcaaagaagttgatatcgagggaacaacggtgattgaggtcggcctggacccttccaacaacatgacccttgctgtggactgtgttgggatcctgaagctccggaatgccgatgtggaagcgcgcatcggaattgccggcagcaaaaagaagtctacaagagctcggctggtcttcagagtgaacatcatgcgcaaagacgggtccacccttacactgcaaacccccagctcccccattctctgcacgcagcctgccggagtcccggagatcctgaagaaatctctgcacagctgttccgtgaagggcgaagaggaagtttttctcattggcaaaaatttcctgaaggggacaaaggtgatctttcaggagaacgtctctgatgagaatagctggaaatccgaagctgagattgacatggaacttttccaccagaaccatctgatcgtgaaggttcccccttatcacgatcaacatatcaccctccccgtgagcgtcggaatttacgtggtgaccaatgccggccggtctcacgacgttcagccttttacatacacccccgatccggcggccgctggggccctgaacgtcaatgtgaaaaaggagatctccagccctgctagaccctgctctttcgaagaggccatgaaagccatgaagacaacgggatgcaaccttgacaaggtgaatattatccctaacgctctgatgacgcccctcattccttccagcatgatcaaatctgaggatgtcacacccatggaagtgaccgcggagaagcgcagctccacaatctttaaaaccaccaagagcgttggctctacccagcagacactggaaaatatttccaacatcgccgggaatggcagcttctcctctccgagctcctctcatctgcctagcgagaacgagaaacaacagcagattcagcccaaggcttataaccccgaaaccctcacaaccatccaaacgcaggacatttcccagcctggaacattcccggccgtgtctgccagctcccagctgcccaatagcgatgcccttctgcaacaggccacccagtttcaaacacgggagacccagtctagagaaatcctccagtccgacggcaccgtcgtgaacctgagccagcttacagaggcgtctcaacagcagcagcaatcccctctgcaggaacaggctcagacgctccaacagcagatcagctctaatattttcccctcccctaacagcgtttcccaactgcagaataccatccagcagctgcaagccgggagctttacaggatctaccgccagcggctcctctgggagcgtggacctcgtccaacaggtgctggaggctcagcagcagctttcctctgttctgttcagcgcccccgatggaaacgagaatgtgcaggaacagctctccgctgacatttttcaacaggtctctcagatccagagcggcgtgtcccctgggatgttcagctctacagagcccaccgtgcacacgcgcccggataacctgctgcctggccgggccgaatccgtccacccccaaagcgagaatacactttctaaccagcagcaacagcagcagcaacagcagcaggttatggaatccagcgcggccatggtgatggagatgcaacagtccatttgtcaggctgccgctcagatccaatctgagctctttcctagcaccgcctccgcgaatggaaacctgcagcagagccccgtgtaccaacagacctctcatatgatgtccgccctgagcacaaatgaagacatgcagatgcagtgcgaactcttctctagcccgcctgctgtctccggcaacgagacctctacaacgaccacacaacaggtggccacccccgggacaaccatgtttcagacgagctcctctggagatggcgaggaaaccgggacacaggctaagcaaattcagaatagcgttttccagaccatggtgcagatgcaacactccggagacaaccagcctcaggtcaacctgtttagctctacaaaatccatgatgagcgtgcagaatagcggcacccaacagcaggggaacggccttttccaacagggaaatgagatgatgtctctgcagagcggcaactttctccagcaatcctctcatagccaggcccagctgttccacccccagaatcccatcgccgatgctcaaaacctgtcccaggagacacaggggagccttttccactctcctaatccgatcgttcattcccagaccagcacgacatcttccgaacaaatgcagccccctatgtttcacagccagtctaccattgcggtgctccaaggaagctccgtcccccaggaccagcagtctaccaacatcttcctgagccaatcccctatgaataacctgcagacaaataccgtggcccaggaggcctttttcgctgcccccaacagcatttcccctctccagtctacgagcaattccgaacaacaggctgcctttcagcagcaagcgccgatctctcatattcagacacccatgctgagccaggagcaagctcagcctccccagcagggccttttccaacctcaggttgccctggggtccctgcccccgaaccctatgccccagtctcagcaaggaaccatgtttcagagccagcactccatcgtggccatgcagagcaattctccctcccaagagcagcagcagcaacagcagcaacagcagcagcaacagcagcagcaacagcagagcatcctcttctctaaccagaacacaatggctaccatggcctcccctaagcaaccccctccgaatatgatttttaaccccaatcagaaccctatggcgaatcaggaacaacagaaccagagcatcttccaccagcaatctaatatggctcccatgaaccaggagcagcagcctatgcaatttcagtcccagagcacagtctccagcctgcagaatcccggcccgacccaatctgaaagctcccagacgcctcttttccattctagcccccagattcagctcgtgcaagggtccccttctagccaggagcagcaagtgaccctgtttctgtcccccgcctctatgagcgccctccagacatccatcaaccagcaggatatgcaacagagccctctgtattctccccagaataacatgccgggcattcagggagctacctccagccctcaaccccaggccacacttttccacaataccgctggcgggacgatgaaccagctgcaaaattctcccggatccagccagcagacatccggcatgttcctctttgggatccagaacaattgttctcaactgctgaccagcggacctgccacacttccggaccagctcatggcgatctcccagcccggccagcctcaaaacgaaggccagccccctgtcaccaccctgctgagccagcagatgcccgagaactctcctctcgcctccagcattaatacaaaccaaaatatcgagaaaattgatctgcttgtttctctgcagaaccaggggaataacctcacgggatccttctga

SEQ ID NO: 1538 - RNA, 51 nt, synthetic construct
  misc_feature 1..51: note = Homo sapiens__O94916-2__NFAT5(1-17) CDS opt5
  source 1..51: mol_type = other RNA
atgggcggggcctgcagctccttcaccacatctagctcccccacgatctac

SEQ ID NO: 1539 - RNA, 4368 nt, synthetic construct
  misc_feature 1..4368: note = Homo sapiens__O94916-2__NFAT5 CDS opt11
  source 1..4368: mol_type = other RNA
atgggaggggcatgcagctcgttcactacttcctcttcacccaccatctactccaccagcgttaccgacagtaaagccatgcaagtagaatcatgttcgtccgccgtcggagtctccaaccgcggtgtgtcagagaagcaacttacatcaaacacggtacaacaacacccgtccacacctaaaagacacaccgtcttgtatatctccccaccacccgaagacctcctagacaactctcggatgtcctgtcaagacgaaggctgcggactcgaaagtgaacaatcatgcagcatgtggatggaagactccccctcaaacttcagcaacatgtcaacctcttcatataacgataacaccgaagtccctaggaagtcacgaaaacggaaccccaaacagcgacctggagttaaacgcagagactgcgaggagtcaaacatggacattttcgatgccgactccgccaaagctcctcactatgtactgtcccagctcaccaccgataacaaaggcaattctaaggccggcaatggcactctcgaaaaccaaaaaggaaccggagtcaagaaatcacccatgctatgcggtcagtaccccgtgaaatcggaaggtaaagaacttaaaatcgtcgtccagcccgaaactcaacaccgcgcccgttacctcactgagggctctcgaggctcagtaaaagaccgcacccaacaagggtttccaacggtcaagctcgaaggacacaacgagcccgtcgtccttcaagtcttcgttgggaacgattccggacgcgtcaagccccacggcttttaccaagcctgcagagtcacaggacgaaacaccaccccctgcaaagaagtagatatcgaaggcacaaccgtaatcgaagtcggcctcgacccctccaacaatatgacactcgccgttgactgcgtcggaatccttaaactcagaaacgccgatgtcgaagcacgcatcggaatagccggctctaaaaagaaatccaccagggcacgcctagtcttccgagtgaatatcatgcggaaagacggctccaccctaacactccagacgcccagctcccctatcctctgcacccaacccgcgggcgtccccgagatcctaaagaaaagcctccatagctgctccgttaaaggagaagaagaagtcttcctaatcggcaaaaactttctcaaaggtaccaaagtcatcttccaagagaacgtcagcgacgaaaactcatggaaaagcgaagccgaaatcgatatggaattattccaccaaaaccacctaattgtcaaagtacccccttaccacgaccaacacataactctccccgtatccgtaggaatatatgtcgttacaaacgctggccgctcccacgacgtccaacccttcacgtacacccctgaccctgccgcagccggtgccctaaacgtcaatgtcaagaaagaaatctcaagcccagcccgcccctgctctttcgaggaagcaatgaaagcaatgaaaaccaccgggtgcaacctcgacaaagttaacatcatcccgaacgccctcatgacgcccctgattccttcctcaatgattaaatccgaagacgtcacacccatggaggtaacggccgagaaacgctcctctacaatcttcaagacaacaaaatcagtaggatccacccaacaaacgctagaaaacatatccaacatcgccggaaatggctcattctcctctccctcatcatcccaccttccttcggaaaacgaaaaacagcaacaaatacaacccaaggcttacaacccagaaaccctcacgactatacaaacccaagacatctcccaacccggcacttttcccgcggtctcagcatcatcgcaactccccaattccgacgccctcttacagcaagcaacccagttccaaacccgcgaaacccaaagccgtgaaatcctccaaagcgatggaactgtcgtcaacctcagccaactcaccgaggcgagccaacaacaacaacaaagcccacttcaagaacaagcacagaccctccaacaacaaatctccagcaacatattcccaagcccaaattccgtctctcaactgcaaaacaccatccagcaactccaagcaggcagctttaccggctccaccgcaagcggttcatcgggttcagtcgacttagtccaacaggttctggaagcgcaacaacaattaagctctgttctcttttccgcaccggacggaaacgagaatgttcaagaacagttatcagcggacatcttccaacaagtgtcacaaatccagagcggcgtatccccgggcatgttctcatctaccgaaccaacagtacacacacgcccagacaacctcctccccggcagggcagagagcgttcacccccaatccgaaaacaccctttcaaaccaacaacaacaacagcagcaacagcaacaagtcatggaatcctcagccgccatggtaatggagatgcaacaatcaatctgtcaagctgccgcacaaatacagtccgaattattcccctcaacagcatcagccaatggaaatctccagcaatcccccgtctaccaacaaacctctcatatgatgtcagcactatcaaccaacgaagacatgcaaatgcaatgcgaactgttcagctctccgcctgccgtaagcggcaatgaaacgagcacaaccaccacgcaacaagtagcaacacctggaacaaccatgtttcaaacatcgtctagcggggacggcgaggaaaccggcacacaagcaaagcagatccaaaactctgtattccaaaccatggtacaaatgcaacactcaggcgataaccagcctcaagtcaacttgttctcctccacgaaatcaatgatgtccgtgcaaaacagcggaacccagcagcaaggcaacggactcttccaacaaggaaacgaaatgatgtcgctccaatccggtaactttctccaacagtcgtcccactcccaggcacaactcttccacccgcaaaaccccatagccgacgcgcaaaatctttctcaagagacccaagggagcctgttccattcaccgaaccccatagtccactcgcaaacttccaccacatcctcagagcagatgcaaccacccatgttccacagccaatccacaatagcggtgctccaaggatcttccgttccacaggaccaacaatcgacaaacatctttctatcacagtccccaatgaacaaccttcagacaaacactgtcgctcaagaagcatttttcgcagcgcctaacagcatatcacccctacagtccacttccaactccgagcaacaagctgcgttccaacaacaagcccctatcagccacatccaaacccccatgctaagccaagagcaggctcagccaccacaacaaggcctcttccaaccccaggtagccctgggaagcctcccacctaaccccatgcctcagtcgcaacaaggcaccatgttccaatcccaacactccatcgtcgctatgcaaagcaactctccaagccaggaacagcagcagcaacaacaacaacaacaacaacagcaacaacaacaacaacaatccatcctcttttccaaccagaacaccatggccaccatggcctcacccaaacaacccccgcccaatatgatcttcaacccaaatcaaaaccctatggccaatcaggagcaacaaaatcagtcgatcttccatcaacaaagcaacatggccccaatgaaccaagagcaacaacctatgcagttccaatcacaatcaacagtctcctccctccaaaaccccggccctacccaaagcgaatcctcccaaacacccctcttccactccagcccgcaaatacaacttgtacaaggctccccatcatcacaggaacaacaagtgaccctcttcctttcacccgcatccatgtccgctctccaaacctccataaaccaacaggatatgcaacaaagcccattatactccccgcagaacaacatgccaggcatccaaggtgcaacctcatcaccccaaccccaagccaccctgttccacaatacagcgggcggcaccatgaaccagctacaaaattcaccaggcagcagccaacaaacgtcgggaatgttcttgttcggcatccagaacaactgttcccaattactcacctccggacccgccacactcccggatcaactcatggcaatttcccagcctgggcaacctcaaaacgagggccaaccgcctgtaacgactttactttcccagcagatgcccgaaaactcccccttagcctccagtataaacaccaaccagaacatagagaaaatcgatctccttgtcagtttgcaaaaccaaggaaacaacctcacgggttccttctag

SEQ ID NO: 1540 - RNA, 51 nt, synthetic construct
  misc_feature 1..51: note = Homo sapiens__O94916-2__NFAT5(1-17) CDS opt11
  source 1..51: mol_type = other RNA
atgggaggggcatgcagctcgttcactacttcctcttcacccaccatctac

SEQ ID NO: 1541 - protein, 197 aa, synthetic construct
  REGION 1..197: note = Artificial____CBFbeta(1-165)_Linker_NFAT5(1-17) protein
MPRVVPDQRSKFENEEFFRKLSRECEIKYTGFRDRPHEERQARFQNACRDGRSEIAFVATGTNLSLQFFPASWQGEQRQTPSREYVDLEREAGKVYLKAPMILNGVCVIWKGWIDLQRLDGMGCLEFDEERAQQEDALAQQAFEEARRRTREFEDRDRSHREEMEGGSGGSGGSGGSGGGMGGACSSFTTSSSPTIY

SEQ ID NO: 1542 - protein, 197 aa, synthetic construct
  REGION 1..197: note = Artificial____NFAT5(1-17)_Linker_CBFbeta(1-165) protein
MGGACSSFTTSSSPTIYGGSGGSGGSGGSGGGMPRVVPDQRSKFENEEFFRKLSRECEIKYTGFRDRPHEERQARFQNACRDGRSEIAFVATGTNLSLQFFPASWQGEQRQTPSREYVDLEREAGKVYLKAPMILNGVCVIWKGWIDLQRLDGMGCLEFDEERAQQEDALAQQAFEEARRRTREFEDRDRSHREEME

SEQ ID NO: 1543 - protein, 182 aa, synthetic construct
  REGION 1..182: note = Artificial____CBFbeta(1-165)_NFAT5(1-17) protein
MPRVVPDQRSKFENEEFFRKLSRECEIKYTGFRDRPHEERQARFQNACRDGRSEIAFVATGTNLSLQFFPASWQGEQRQTPSREYVDLEREAGKVYLKAPMILNGVCVIWKGWIDLQRLDGMGCLEFDEERAQQEDALAQQAFEEARRRTREFEDRDRSHREEMEMGGACSSFTTSSSPTIY

SEQ ID NO: 1544 - protein, 182 aa, synthetic construct
  REGION 1..182: note = Artificial____NFAT5(1-17)_CBFbeta(1-165) protein
MGGACSSFTTSSSPTIYMPRVVPDQRSKFENEEFFRKLSRECEIKYTGFRDRPHEERQARFQNACRDGRSEIAFVATGTNLSLQFFPASWQGEQRQTPSREYVDLEREAGKVYLKAPMILNGVCVIWKGWIDLQRLDGMGCLEFDEERAQQEDALAQQAFEEARRRTREFEDRDRSHREEME

SEQ ID NO: 1545 - protein, 492 aa, synthetic construct
  REGION 1..492: note = Artificial____CBFbeta(1-141)_SMMHC(1527-1877) protein
MPRVVPDQRSKFENEEFFRKLSRECEIKYTGFRDRPHEERQARFQNACRDGRSEIAFVATGTNLSLQFFPASWQGEQRQTPSREYVDLEREAGKVYLKAPMILNGVCVIWKGWIDLQRLDGMGCLEFDEERAQQEDALAQQVHELEKSKRALETQMEEMKTQLEELEDELQATEDAKLRLEVNMQALKGQFERDLQARDEQNEEKRRQLQRQLHEYETELEDERKQRALAAAAKKKLEGDLKDLELQADSAIKGREEAIKQLRKLQAQMKDFQRELEDARASRDEIFATAKENEKKAKSLEADLMQLQEDLAAAERARKQADLEKEELAEELASSLSGRNALQDEKRRLEARIAQLEEELEEEQGNMEAMSDRVRKATQQAEQLSNELATERSTAQKNESARQQLERQNKELRSKLHEMEGAVKSKFKSTIAALEAKIAQLEEQVEQEAREKQAATKSLKQKDKKLKEILLQVEDERKMAEQYKEQAEKGNA

SEQ ID NO: 1546 - protein, 491 aa, synthetic construct
  REGION 1..491: note Artificial____CBFbeta(1-130)_Linker_Linker_SMMHC(1527-1877) protein
MPRVVPDQRSKFENEEFFRKLSRECEIKYTGFRDRPHEERQARFQNACRDGRSEIAFVATGTNLSLQFFPASWQGEQRQTPSREYVDLEREAGKVYLKAPMILNGVCVIWKGWIDLQRLDGMGCLEFDEEGGGGSGGGGSVHELEKSKRALETQMEEMKTQLEELEDELQATEDAKLRLEVNMQALKGQFERDLQARDEQNEEKRRQLQRQLHEYETELEDERKQRALAAAAKKKLEGDLKDLELQADSAIKGREEAIKQLRKLQAQMKDFQRELEDARASRDEIFATAKENEKKAKSLEADLMQLQEDLAAAERARKQADLEKEELAEELASSLSGRNALQDEKRRLEARIAQLEEELEEEQGNMEAMSDRVRKATQQAEQLSNELATERSTAQKNESARQQLERQNKELRSKLHEMEGAVKSKFKSTIAALEAKIAQLEEQVEQEAREKQAATKSLKQKDKKLKEILLQVEDERKMAEQYKEQAEKGNA

SEQ ID NO: 1547 - protein, 193 aa, synthetic construct
  REGION 1..193: note = Artificial____CBFbeta(1-165)_Linker_Lifeact protein
MPRVVPDQRSKFENEEFFRKLSRECEIKYTGFRDRPHEERQARFQNACRDGRSEIAFVATGTNLSLQFFPASWQGEQRQTPSREYVDLEREAGKVYLKAPMILNGVCVIWKGWIDLQRLDGMGCLEFDEERAQQEDALAQQAFEEARRRTREFEDRDRSHREEMEGGGGSGVADLIKKFESISKEEGDPPVAT

SEQ ID NO: 1548 - protein, 203 aa, synthetic construct
  REGION 1..203: note = Artificial____CBFbeta(1-165)_Linker_Lifeact protein
MPRVVPDQRSKFENEEFFRKLSRECEIKYTGFRDRPHEERQARFQNACRDGRSEIAFVATGTNLSLQFFPASWQGEQRQTPSREYVDLEREAGKVYLKAPMILNGVCVIWKGWIDLQRLDGMGCLEFDEERAQQEDALAQQAFEEARRRAREFEDRDRSHREEMEGGSGGSGGSGGSGGGGVADLIKKFESISKEEGDPPVAT

SEQ ID NO: 1549 - RNA, 594 nt, synthetic construct
  misc_feature 1..594: note = Artificial____CBFbeta(1-165)_Linker_NFAT5(1-17) CDS opt1
  source 1..594: mol_type = other RNA
atgccccgcgtggtcccggaccagcggagcaagttcgagaacgaggagttcttccgcaagctgtcccgggagtgcgagatcaagtacaccggcttccgcgaccggccccacgaggagcgccaggcccggttccagaacgcctgccgcgacgggcggagcgagatcgcgttcgtggccaccggcacgaacctctccctgcagttcttccccgccagctggcagggggagcagcgccagaccccctcccgggagtacgtggacctggagcgcgaggccggcaaggtctacctcaaggccccgatgatcctgaacggggtgtgcgtgatctggaagggctggatcgacctgcagcggctcgacggcatggggtgcctggagttcgacgaggagcgcgcgcagcaggaggacgccctggcccagcaggccttcgaggaggcgcggcgccggacccgcgagttcgaggaccgggaccgcagccaccgggaggagatggagggcgggagcggcgggtccggcgggagcggcggctccgggggcgggatgggcggggcctgcagctccttcaccaccagctccagccccacgatctactga

SEQ ID NO: 1550 - RNA, 594 nt, synthetic construct
  misc_feature 1..594: note = Artificial____NFAT5(1-17)_Linker_CBFbeta(1-165) CDS opt1
  source 1..594: mol_type = other RNA
atgggcggggcctgcagctccttcaccaccagctccagccccacgatctacggcgggagcggcgggtccggcgggagcggcggctccgggggcgggatgccccgcgtggtcccggaccagcggagcaagttcgagaacgaggagttcttccgcaagctgtcccgggagtgcgagatcaagtacaccggcttccgcgaccggccccacgaggagcgccaggcccggttccagaacgcctgccgcgacgggcggagcgagatcgcgttcgtggccaccggcacgaacctctccctgcagttcttccccgccagctggcagggggagcagcgccagaccccctcccgggagtacgtggacctggagcgcgaggccggcaaggtctacctcaaggccccgatgatcctgaacggggtgtgcgtgatctggaagggctggatcgacctgcagcggctcgacggcatggggtgcctggagttcgacgaggagcgcgcgcagcaggaggacgccctggcccagcaggccttcgaggaggcgcggcgccggacccgcgagttcgaggaccgggaccgcagccaccgggaggagatggagtga

SEQ ID NO: 1551 - RNA, 549 nt, synthetic construct
  misc_feature 1..549: note = Artificial____CBFbeta(1-165)_NFAT5(1-17) CDS opt1
  source 1..549: mol_type = other RNA
atgccccgcgtggtcccggaccagcggagcaagttcgagaacgaggagttcttccgcaagctgtcccgggagtgcgagatcaagtacaccggcttccgcgaccggccccacgaggagcgccaggcccggttccagaacgcctgccgcgacgggcggagcgagatcgcgttcgtggccaccggcacgaacctctccctgcagttcttccccgccagctggcagggggagcagcgccagaccccctcccgggagtacgtggacctggagcgcgaggccggcaaggtctacctcaaggccccgatgatcctgaacggggtgtgcgtgatctggaagggctggatcgacctgcagcggctcgacggcatggggtgcctggagttcgacgaggagcgcgcgcagcaggaggacgccctggcccagcaggccttcgaggaggcgcggcgccggacccgcgagttcgaggaccgggaccgcagccaccgggaggagatggagatgggcggggcctgcagctccttcaccaccagctccagccccacgatctactga

SEQ ID NO: 1552 - RNA, 549 nt, synthetic construct
  misc_feature 1..549: note = Artificial____NFAT5(1-17)_CBFbeta(1-165) CDS opt1
  source 1..549: mol_type = other RNA
atgggcggggcctgcagctccttcaccaccagctccagccccacgatctacatgccccgcgtggtcccggaccagcggagcaagttcgagaacgaggagttcttccgcaagctgtcccgggagtgcgagatcaagtacaccggcttccgcgaccggccccacgaggagcgccaggcccggttccagaacgcctgccgcgacgggcggagcgagatcgcgttcgtggccaccggcacgaacctctccctgcagttcttccccgccagctggcagggggagcagcgccagaccccctcccgggagtacgtggacctggagcgcgaggccggcaaggtctacctcaaggccccgatgatcctgaacggggtgtgcgtgatctggaagggctggatcgacctgcagcggctcgacggcatggggtgcctggagttcgacgaggagcgcgcgcagcaggaggacgccctggcccagcaggccttcgaggaggcgcggcgccggacccgcgagttcgaggaccgggaccgcagccaccgggaggagatggagtga

SEQ ID NO: 1553 - RNA, 1479 nt, synthetic construct
  misc_feature 1..1479: note = Artificial____CBFbeta(1-141)_SMMHC(1527-1877) CDS opt1
  source 1..1479: mol_type = other RNA
atgccccgcgtggtcccggaccagcggagcaagttcgagaacgaggagttcttccgcaagctgtcccgggagtgcgagatcaagtacaccggcttccgcgaccggccccacgaggagcgccaggcccggttccagaacgcctgccgcgacgggcggagcgagatcgcgttcgtggccaccggcacgaacctctccctgcagttcttccccgccagctggcagggggagcagcgccagaccccctcccgggagtacgtggacctggagcgcgaggccggcaaggtctacctcaaggccccgatgatcctgaacggggtgtgcgtgatctggaagggctggatcgacctgcagcggctcgacggcatggggtgcctggagttcgacgaggagcgcgcgcagcaggaggacgccctggcccagcaggtgcacgagctggagaagtccaagcgcgccctcgagacccagatggaggagatgaagacccagctggaggagctggaggacgagctccaggccacggaggacgcgaagctgcggctggaggtcaacatgcaggccctcaagggccagttcgagcgcgacctgcaggcccgggacgagcagaacgaggagaagcgccggcagctgcagcgccagctccacgagtacgagaccgagctggaggacgagcggaagcagcgcgccctggccgcggccgccaagaagaagctcgagggggacctgaaggacctggagctccaggccgacagcgcgatcaagggccgggaggaggccatcaagcagctgcgcaagctgcaggcccagatgaaggacttccagcgggagctcgaggacgcccgcgccagccgggacgagatcttcgcgaccgccaaggagaacgagaagaaggccaagtccctggaggccgacctgatgcagctccaggaggacctggccgcggccgagcgcgcccggaagcaggccgacctggagaaggaggagctcgccgaggagctggcgagctccctgagcgggcgcaacgccctccaggacgagaagcggcgcctggaggcccggatcgcccagctggaggaggagctcgaggaggagcagggcaacatggaggccatgtccgaccgcgtgcggaaggcgacccagcaggccgagcagctgagcaacgagctggccacggagcgctccaccgcccagaagaacgagagcgcgcgccagcagctcgagcggcagaacaaggagctgcgctccaagctgcacgagatggagggggccgtgaagtccaagttcaagagcaccatcgccgccctcgaggccaagatcgcgcagctggaggagcaggtcgagcaggaggcccgggagaagcaggccgccaccaagagcctgaagcagaaggacaagaagctcaaggagatcctgctccaggtggaggacgagcgcaagatggccgagcagtacaaggagcaggcggagaagggcaacgcctga

SEQ ID NO: 1554 - RNA, 1476 nt, synthetic construct
  misc_feature 1..1476: note Artificial____CBFbeta(1-130)_Linker_Linker_SMMHC(1527-1877) CDS opt1
  source 1..1476: mol_type = other RNA
atgccccgcgtggtcccggaccagcggagcaagttcgagaacgaggagttcttccgcaagctgtcccgggagtgcgagatcaagtacaccggcttccgcgaccggccccacgaggagcgccaggcccggttccagaacgcctgccgcgacgggcggagcgagatcgcgttcgtggccaccggcacgaacctctccctgcagttcttccccgccagctggcagggggagcagcgccagaccccctcccgggagtacgtggacctggagcgcgaggccggcaaggtctacctcaaggccccgatgatcctgaacggggtgtgcgtgatctggaagggctggatcgacctgcagcggctcgacggcatggggtgcctggagttcgacgaggagggcggcggcggctccggtggcgggggctccgtgcacgagctggagaagtccaagcgcgccctcgagacccagatggaggagatgaagacccagctggaggagctggaggacgagctccaggccacggaggacgcgaagctgcggctggaggtcaacatgcaggccctcaagggccagttcgagcgcgacctgcaggcccgggacgagcagaacgaggagaagcgccggcagctgcagcgccagctccacgagtacgagaccgagctggaggacgagcggaagcagcgcgccctggccgcggccgccaagaagaagctcgagggggacctgaaggacctggagctccaggccgacagcgcgatcaagggccgggaggaggccatcaagcagctgcgcaagctgcaggcccagatgaaggacttccagcgggagctcgaggacgcccgcgccagccgggacgagatcttcgcgaccgccaaggagaacgagaagaaggccaagtccctggaggccgacctgatgcagctccaggaggacctggccgcggccgagcgcgcccggaagcaggccgacctggagaaggaggagctcgccgaggagctggcgagctccctgagcgggcgcaacgccctccaggacgagaagcggcgcctggaggcccggatcgcccagctggaggaggagctcgaggaggagcagggcaacatggaggccatgtccgaccgcgtgcggaaggcgacccagcaggccgagcagctgagcaacgagctggccacggagcgctccaccgcccagaagaacgagagcgcgcgccagcagctcgagcggcagaacaaggagctgcgctccaagctgcacgagatggagggggccgtgaagtccaagttcaagagcaccatcgccgccctcgaggccaagatcgcgcagctggaggagcaggtcgagcaggaggcccgggagaagcaggccgccaccaagagcctgaagcagaaggacaagaagctcaaggagatcctgctccaggtggaggacgagcgcaagatggccgagcagtacaaggagcaggcggagaagggcaacgcctga

SEQ ID NO: 1555 - RNA, 582 nt, synthetic construct
  misc_feature 1..582: note = Artificial____CBFbeta(1-165)_Linker_Lifeact CDS opt1
  source 1..582: mol_type = other RNA
atgccccgcgtggtcccggaccagcggagcaagttcgagaacgaggagttcttccgcaagctgtcccgggagtgcgagatcaagtacaccggcttccgcgaccggccccacgaggagcgccaggcccggttccagaacgcctgccgcgacgggcggagcgagatcgcgttcgtggccaccggcacgaacctctccctgcagttcttccccgccagctggcagggggagcagcgccagaccccctcccgggagtacgtggacctggagcgcgaggccggcaaggtctacctcaaggccccgatgatcctgaacggggtgtgcgtgatctggaagggctggatcgacctgcagcggctcgacggcatggggtgcctggagttcgacgaggagcgcgcgcagcaggaggacgccctggcccagcaggccttcgaggaggcgcggcgccggacccgcgagttcgaggaccgggaccgcagccaccgggaggagatggagggcggcggcggctccggcgtggccgacctgatcaagaagttcgagagcatctccaaggaggagggggacccgcccgtcgccacctga

SEQ ID NO: 1556 - RNA, 612 nt, synthetic construct
  misc_feature 1..612: note = Artificial____CBFbeta(1-165)_Linker_Lifeact CDS opt1
  source 1..612: mol_type = other RNA
atgccccgcgtggtcccggaccagcggagcaagttcgagaacgaggagttcttccgcaagctgtcccgggagtgcgagatcaagtacaccggcttccgcgaccggccccacgaggagcgccaggcccggttccagaacgcctgccgcgacgggcggagcgagatcgcgttcgtggccaccggcacgaacctctccctgcagttcttccccgccagctggcagggggagcagcgccagaccccctcccgggagtacgtggacctggagcgcgaggccggcaaggtctacctcaaggccccgatgatcctgaacggggtgtgcgtgatctggaagggctggatcgacctgcagcggctcgacggcatggggtgcctggagttcgacgaggagcgcgcgcagcaggaggacgccctggcccagcaggccttcgaggaggcgcggcgccgggcccgcgagttcgaggaccgggaccgcagccaccgggaggagatggagggcgggagcggcgggtccggcgggagcggcggctccgggggcgggggcgtggccgacctgatcaagaagttcgagagcatctccaaggaggagggggacccgcccgtcgccacctga

SEQ ID NO: 1557 - RNA, 1551 nt, synthetic construct
  misc_feature 1..1551: note = Artificial____CBFbeta(1-165)_SMMHC(1527-1877) CDS opt4 mod
  source 1..1551: mol_type = other RNA
atgcccagagtggtgcccgaccagagaagcaagttcgagaacgaggagttcttcagaaagctgagcagagagtgcgagatcaagtacaccggcttcagagacagaccccacgaggagagacaggccagattccagaacgcctgcagagacggcagaagcgagatcgccttcgtggccaccggcaccaacctgagcctgcagttcttccccgccagctggcagggcgagcagagacagacccccagcagagagtacgtggacctggagagagaggccggcaaggtgtacctgaaggcccccatgatcctgaacggcgtgtgcgtgatctggaagggctggatcgacctgcagagactggacggcatgggctgcctggagttcgacgaggagagagcccagcaggaggacgccctggcccagcaggccttcgaggaggccagaagaagaaccagagagttcgaggacagagacagaagccacagagaggagatggaggtgcacgagctggagaagtccaagagagccctggagacccagatggaggagatgaagacccagctggaggagctggaggacgagctgcaggccaccgaggacgccaagctgagactggaggtgaacatgcaggccctgaagggccagttcgagagagacctgcaggccagagacgagcagaacgaggagaagagaagacagctgcagagacagctgcacgagtacgagaccgagctggaggacgagagaaagcagagagccctggccgccgccgccaagaagaagctggagggcgacctgaaggacctggagctgcaggccgacagcgccatcaagggcagagaggaggccatcaagcagctgagaaagctgcaggcccagatgaaggacttccagagagagctggaggacgccagagccagcagagacgagatcttcgccaccgccaaggagaacgagaagaaggccaagagcctggaggccgacctgatgcagctgcaggaggacctggccgccgccgagagagccagaaagcaggccgacctggagaaggaggagctggccgaggagctggccagcagcctgagcggcagaaacgccctgcaggacgagaagagaagactggaggccagaatcgcccagctggaggaggagctggaggaggagcagggcaacatggaggccatgagcgacagagtgagaaaggccacccagcaggccgagcagctgagcaacgagctggccaccgagagaagcaccgcccagaagaacgagagcgccagacagcagctggagagacagaacaaggagctgagaagcaagctgcacgagatggagggcgccgtgaagtccaagttcaagagcaccatcgccgccctggaggccaagatcgcccagctggaggagcaggtcgagcaggaggccagagagaagcaggccgccaccaagagcctgaagcagaaggacaagaagctgaaggagatcctgctgcaggtcgaggacgagagaaagatggccgagcagtacaaggagcaggccgagaagggcaacgcctga

SEQ ID NO: 1558 - RNA, 1551 nt, synthetic construct
  misc_feature 1..1551: note = Artificial____CBFbeta(1-165)_SMMHC(1527-1877) CDS opt11 mod
  source 1..1551: mol_type = other RNA
atgccgagggtggtgccagaccaaaggagcaagttcgagaacgaggaatttttcagaaagctgagcagagagtgcgagataaagtacacggggtttagagacagaccacacgaggagaggcaggcaaggttccagaacgcatgcagagacgggagaagcgagatagcattcgtagcgacaggaacaaacctaagcctacaatttttcccggcgagctggcagggagagcagagacagacgccaagcagggagtacgtggacctagagagggaagcaggaaaggtgtacctaaaggcaccaatgatactaaatggggtgtgcgtaatatggaaggggtggatagacctacagagactggacgggatgggatgcttggagttcgacgaagagagagcgcaacaggaggacgcactggcacaacaagcattcgaagaggcaaggaggaggacgagagagttcgaggacagagacaggagtcacagggaggaaatggaggtacacgaactagagaaaagcaagagggcgctggagacacagatggaagagatgaaaacgcaactggaggagctggaagacgagctgcaggcaacagaagatgcgaagctaaggctggaggtgaacatgcaggcactgaaaggacagttcgaaagggacctgcaggcgagggacgaacagaacgaggaaaagaggaggcagctccagaggcagctacacgagtacgagacggagttggaagacgagagaaagcaaagagcactagcggcggcggcgaagaaaaagctagagggagacctcaaagatctggagctacaggcagacagcgcgataaagggcagggaggaagcgataaagcagctaaggaagctgcaggcacagatgaaggacttccagagggagctcgaggacgcaagagcgagccgggacgagatattcgccacggcaaaggagaacgaaaagaaggcgaaaagcctggaggcggacctaatgcaactgcaagaagacctggcagcggcagagcgagcgaggaagcaggcagacctagagaaggaggagctggcggaagaactggcgagtagcctgagcggaaggaacgcactgcaggacgagaagaggaggctagaggcaagaatagcgcagctggaggaggagttggaggaggagcaggggaacatggaggcgatgagcgacagagtgagaaaggcgacacagcaagcagagcagttaagcaacgagctggcaacagagagaagcacggcgcaaaagaacgaatcagcgaggcaacagttggagaggcagaacaaggaactaagaagcaagctgcacgagatggagggcgcggtaaagagcaaattcaagtcaacaatagcggcgcttgaggcaaagatagcacagctggaagaacaagtagaacaggaggcgagagagaaacaagcagcgacaaagagcctgaaacagaaggacaagaagttaaaggagatactgctacaggtagaggacgaaagaaaaatggcggaacagtacaaagagcaggcagaaaaggggaacgcatga

SEQ ID NO: 1559 - RNA, 866 nt, synthetic construct
  misc_feature 1..866: note = Artificial____CBFbeta(1-165)_Linker_NFAT5(1-17) mRNA opt1
  source 1..866: mol_type = other RNA
aggagagtcccgcagtcggcgtccagcggctctgcttgttcgtgtgtgtgtcgttgcaggccttattcaagcttaccatgccccgcgtggtcccggaccagcggagcaagttcgagaacgaggagttcttccgcaagctgtcccgggagtgcgagatcaagtacaccggcttccgcgaccggccccacgaggagcgccaggcccggttccagaacgcctgccgcgacgggcggagcgagatcgcgttcgtggccaccggcacgaacctctccctgcagttcttccccgccagctggcagggggagcagcgccagaccccctcccgggagtacgtggacctggagcgcgaggccggcaaggtctacctcaaggccccgatgatcctgaacggggtgtgcgtgatctggaagggctggatcgacctgcagcggctcgacggcatggggtgcctggagttcgacgaggagcgcgcgcagcaggaggacgccctggcccagcaggccttcgaggaggcgcggcgccggacccgcgagttcgaggaccgggaccgcagccaccgggaggagatggagggcgggagcggcgggtccggcgggagcggcggctccgggggcgggatgggcggggcctgcagctccttcaccaccagctccagccccacgatctactgaggactagtccctgttcccagagcccacttttttttctttttttgaaataaaatagcctgtctttcagatctcaaaggctcttttcagagccaccaaaaaaaaaaaaaaaaaaaaaaaaaaaaaaaaaaaaaaaaaaaaaaaaaaaaaaaaaaaaaaaaaaaaaaaaaaaaaaaaaaaaaaaaaaaaaaaaaaaaa

SEQ ID NO: 1560 - RNA, 866 nt, synthetic construct
  misc_feature 1..866: note = Artificial____NFAT5(1-17)_Linker_CBFbeta(1-165) mRNA opt1
  source 1..866: mol_type = other RNA
aggagagtcccgcagtcggcgtccagcggctctgcttgttcgtgtgtgtgtcgttgcaggccttattcaagcttaccatgggcggggcctgcagctccttcaccaccagctccagccccacgatctacggcgggagcggcgggtccggcgggagcggcggctccgggggcgggatgccccgcgtggtcccggaccagcggagcaagttcgagaacgaggagttcttccgcaagctgtcccgggagtgcgagatcaagtacaccggcttccgcgaccggccccacgaggagcgccaggcccggttccagaacgcctgccgcgacgggcggagcgagatcgcgttcgtggccaccggcacgaacctctccctgcagttcttccccgccagctggcagggggagcagcgccagaccccctcccgggagtacgtggacctggagcgcgaggccggcaaggtctacctcaaggccccgatgatcctgaacggggtgtgcgtgatctggaagggctggatcgacctgcagcggctcgacggcatggggtgcctggagttcgacgaggagcgcgcgcagcaggaggacgccctggcccagcaggccttcgaggaggcgcggcgccggacccgcgagttcgaggaccgggaccgcagccaccgggaggagatggagtgaggactagtccctgttcccagagcccacttttttttctttttttgaaataaaatagcctgtctttcagatctcaaaggctcttttcagagccaccaaaaaaaaaaaaaaaaaaaaaaaaaaaaaaaaaaaaaaaaaaaaaaaaaaaaaaaaaaaaaaaaaaaaaaaaaaaaaaaaaaaaaaaaaaaaaaaaaaaaa

SEQ ID NO: 1561 - RNA, 821 nt, synthetic construct
  misc_feature 1..821: note = Artificial____CBFbeta(1-165)_NFAT5(1-17) mRNA opt1
  source 1..821: mol_type = other RNA
aggagagtcccgcagtcggcgtccagcggctctgcttgttcgtgtgtgtgtcgttgcaggccttattcaagcttaccatgccccgcgtggtcccggaccagcggagcaagttcgagaacgaggagttcttccgcaagctgtcccgggagtgcgagatcaagtacaccggcttccgcgaccggccccacgaggagcgccaggcccggttccagaacgcctgccgcgacgggcggagcgagatcgcgttcgtggccaccggcacgaacctctccctgcagttcttccccgccagctggcagggggagcagcgccagaccccctcccgggagtacgtggacctggagcgcgaggccggcaaggtctacctcaaggccccgatgatcctgaacggggtgtgcgtgatctggaagggctggatcgacctgcagcggctcgacggcatggggtgcctggagttcgacgaggagcgcgcgcagcaggaggacgccctggcccagcaggccttcgaggaggcgcggcgccggacccgcgagttcgaggaccgggaccgcagccaccgggaggagatggagatgggcggggcctgcagctccttcaccaccagctccagccccacgatctactgaggactagtccctgttcccagagcccacttttttttctttttttgaaataaaatagcctgtctttcagatctcaaaggctcttttcagagccaccaaaaaaaaaaaaaaaaaaaaaaaaaaaaaaaaaaaaaaaaaaaaaaaaaaaaaaaaaaaaaaaaaaaaaaaaaaaaaaaaaaaaaaaaaaaaaaaaaaaaa

SEQ ID NO: 1562 - RNA, 821 nt, synthetic construct
  misc_feature 1..821: note = Artificial____NFAT5(1-17)_CBFbeta(1-165) mRNA opt1
  source 1..821: mol_type = other RNA
aggagagtcccgcagtcggcgtccagcggctctgcttgttcgtgtgtgtgtcgttgcaggccttattcaagcttaccatgggcggggcctgcagctccttcaccaccagctccagccccacgatctacatgccccgcgtggtcccggaccagcggagcaagttcgagaacgaggagttcttccgcaagctgtcccgggagtgcgagatcaagtacaccggcttccgcgaccggccccacgaggagcgccaggcccggttccagaacgcctgccgcgacgggcggagcgagatcgcgttcgtggccaccggcacgaacctctccctgcagttcttccccgccagctggcagggggagcagcgccagaccccctcccgggagtacgtggacctggagcgcgaggccggcaaggtctacctcaaggccccgatgatcctgaacggggtgtgcgtgatctggaagggctggatcgacctgcagcggctcgacggcatggggtgcctggagttcgacgaggagcgcgcgcagcaggaggacgccctggcccagcaggccttcgaggaggcgcggcgccggacccgcgagttcgaggaccgggaccgcagccaccgggaggagatggagtgaggactagtccctgttcccagagcccacttttttttctttttttgaaataaaatagcctgtctttcagatctcaaaggctcttttcagagccaccaaaaaaaaaaaaaaaaaaaaaaaaaaaaaaaaaaaaaaaaaaaaaaaaaaaaaaaaaaaaaaaaaaaaaaaaaaaaaaaaaaaaaaaaaaaaaaaaaaaaa

SEQ ID NO: 1563 - RNA, 1751 nt, synthetic construct
  misc_feature 1..1751: note = Artificial____CBFbeta(1-141)_SMMHC(1527-1877) mRNA opt1
  source 1..1751: mol_type = other RNA
aggagagtcccgcagtcggcgtccagcggctctgcttgttcgtgtgtgtgtcgttgcaggccttattcaagcttaccatgccccgcgtggtcccggaccagcggagcaagttcgagaacgaggagttcttccgcaagctgtcccgggagtgcgagatcaagtacaccggcttccgcgaccggccccacgaggagcgccaggcccggttccagaacgcctgccgcgacgggcggagcgagatcgcgttcgtggccaccggcacgaacctctccctgcagttcttccccgccagctggcagggggagcagcgccagaccccctcccgggagtacgtggacctggagcgcgaggccggcaaggtctacctcaaggccccgatgatcctgaacggggtgtgcgtgatctggaagggctggatcgacctgcagcggctcgacggcatggggtgcctggagttcgacgaggagcgcgcgcagcaggaggacgccctggcccagcaggtgcacgagctggagaagtccaagcgcgccctcgagacccagatggaggagatgaagacccagctggaggagctggaggacgagctccaggccacggaggacgcgaagctgcggctggaggtcaacatgcaggccctcaagggccagttcgagcgcgacctgcaggcccgggacgagcagaacgaggagaagcgccggcagctgcagcgccagctccacgagtacgagaccgagctggaggacgagcggaagcagcgcgccctggccgcggccgccaagaagaagctcgagggggacctgaaggacctggagctccaggccgacagcgcgatcaagggccgggaggaggccatcaagcagctgcgcaagctgcaggcccagatgaaggacttccagcgggagctcgaggacgcccgcgccagccgggacgagatcttcgcgaccgccaaggagaacgagaagaaggccaagtccctggaggccgacctgatgcagctccaggaggacctggccgcggccgagcgcgcccggaagcaggccgacctggagaaggaggagctcgccgaggagctggcgagctccctgagcgggcgcaacgccctccaggacgagaagcggcgcctggaggcccggatcgcccagctggaggaggagctcgaggaggagcagggcaacatggaggccatgtccgaccgcgtgcggaaggcgacccagcaggccgagcagctgagcaacgagctggccacggagcgctccaccgcccagaagaacgagagcgcgcgccagcagctcgagcggcagaacaaggagctgcgctccaagctgcacgagatggagggggccgtgaagtccaagttcaagagcaccatcgccgccctcgaggccaagatcgcgcagctggaggagcaggtcgagcaggaggcccgggagaagcaggccgccaccaagagcctgaagcagaaggacaagaagctcaaggagatcctgctccaggtggaggacgagcgcaagatggccgagcagtacaaggagcaggcggagaagggcaacgcctgaggactagtccctgttcccagagcccacttttttttctttttttgaaataaaatagcctgtctttcagatctcaaaggctcttttcagagccaccaaaaaaaaaaaaaaaaaaaaaaaaaaaaaaaaaaaaaaaaaaaaaaaaaaaaaaaaaaaaaaaaaaaaaaaaaaaaaaaaaaaaaaaaaaaaaaaaaaaaa

SEQ ID NO: 1564 - RNA, 1748 nt, synthetic construct
  misc_feature 1..1748: note Artificial____CBFbeta(1-130)_Linker_Linker_SMMHC(1527-1877) mRNA opt1
  source 1..1748: mol_type = other RNA
aggagagtcccgcagtcggcgtccagcggctctgcttgttcgtgtgtgtgtcgttgcaggccttattcaagcttaccatgccccgcgtggtcccggaccagcggagcaagttcgagaacgaggagttcttccgcaagctgtcccgggagtgcgagatcaagtacaccggcttccgcgaccggccccacgaggagcgccaggcccggttccagaacgcctgccgcgacgggcggagcgagatcgcgttcgtggccaccggcacgaacctctccctgcagttcttccccgccagctggcagggggagcagcgccagaccccctcccgggagtacgtggacctggagcgcgaggccggcaaggtctacctcaaggccccgatgatcctgaacggggtgtgcgtgatctggaagggctggatcgacctgcagcggctcgacggcatggggtgcctggagttcgacgaggagggcggcggcggctccggtggcgggggctccgtgcacgagctggagaagtccaagcgcgccctcgagacccagatggaggagatgaagacccagctggaggagctggaggacgagctccaggccacggaggacgcgaagctgcggctggaggtcaacatgcaggccctcaagggccagttcgagcgcgacctgcaggcccgggacgagcagaacgaggagaagcgccggcagctgcagcgccagctccacgagtacgagaccgagctggaggacgagcggaagcagcgcgccctggccgcggccgccaagaagaagctcgagggggacctgaaggacctggagctccaggccgacagcgcgatcaagggccgggaggaggccatcaagcagctgcgcaagctgcaggcccagatgaaggacttccagcgggagctcgaggacgcccgcgccagccgggacgagatcttcgcgaccgccaaggagaacgagaagaaggccaagtccctggaggccgacctgatgcagctccaggaggacctggccgcggccgagcgcgcccggaagcaggccgacctggagaaggaggagctcgccgaggagctggcgagctccctgagcgggcgcaacgccctccaggacgagaagcggcgcctggaggcccggatcgcccagctggaggaggagctcgaggaggagcagggcaacatggaggccatgtccgaccgcgtgcggaaggcgacccagcaggccgagcagctgagcaacgagctggccacggagcgctccaccgcccagaagaacgagagcgcgcgccagcagctcgagcggcagaacaaggagctgcgctccaagctgcacgagatggagggggccgtgaagtccaagttcaagagcaccatcgccgccctcgaggccaagatcgcgcagctggaggagcaggtcgagcaggaggcccgggagaagcaggccgccaccaagagcctgaagcagaaggacaagaagctcaaggagatcctgctccaggtggaggacgagcgcaagatggccgagcagtacaaggagcaggcggagaagggcaacgcctgaggactagtccctgttcccagagcccacttttttttctttttttgaaataaaatagcctgtctttcagatctcaaaggctcttttcagagccaccaaaaaaaaaaaaaaaaaaaaaaaaaaaaaaaaaaaaaaaaaaaaaaaaaaaaaaaaaaaaaaaaaaaaaaaaaaaaaaaaaaaaaaaaaaaaaaaaaaaaa

SEQ ID NO: 1565 - RNA, 854 nt, synthetic construct
  misc_feature 1..854: note = Artificial____CBFbeta(1-165)_Linker_Lifeact mRNA opt1
  source 1..854: mol_type = other RNA
aggagagtcccgcagtcggcgtccagcggctctgcttgttcgtgtgtgtgtcgttgcaggccttattcaagcttaccatgccccgcgtggtcccggaccagcggagcaagttcgagaacgaggagttcttccgcaagctgtcccgggagtgcgagatcaagtacaccggcttccgcgaccggccccacgaggagcgccaggcccggttccagaacgcctgccgcgacgggcggagcgagatcgcgttcgtggccaccggcacgaacctctccctgcagttcttccccgccagctggcagggggagcagcgccagaccccctcccgggagtacgtggacctggagcgcgaggccggcaaggtctacctcaaggccccgatgatcctgaacggggtgtgcgtgatctggaagggctggatcgacctgcagcggctcgacggcatggggtgcctggagttcgacgaggagcgcgcgcagcaggaggacgccctggcccagcaggccttcgaggaggcgcggcgccggacccgcgagttcgaggaccgggaccgcagccaccgggaggagatggagggcggcggcggctccggcgtggccgacctgatcaagaagttcgagagcatctccaaggaggagggggacccgcccgtcgccacctgaggactagtccctgttcccagagcccacttttttttctttttttgaaataaaatagcctgtctttcagatctcaaaggctcttttcagagccaccaaaaaaaaaaaaaaaaaaaaaaaaaaaaaaaaaaaaaaaaaaaaaaaaaaaaaaaaaaaaaaaaaaaaaaaaaaaaaaaaaaaaaaaaaaaaaaaaaaaaa

SEQ ID NO: 1566 - RNA, 884 nt, synthetic construct
  misc_feature 1..884: note = Artificial____CBFbeta(1-165)_Linker_Lifeact mRNA opt1
  source 1..884: mol_type = other RNA
aggagagtcccgcagtcggcgtccagcggctctgcttgttcgtgtgtgtgtcgttgcaggccttattcaagcttaccatgccccgcgtggtcccggaccagcggagcaagttcgagaacgaggagttcttccgcaagctgtcccgggagtgcgagatcaagtacaccggcttccgcgaccggccccacgaggagcgccaggcccggttccagaacgcctgccgcgacgggcggagcgagatcgcgttcgtggccaccggcacgaacctctccctgcagttcttccccgccagctggcagggggagcagcgccagaccccctcccgggagtacgtggacctggagcgcgaggccggcaaggtctacctcaaggccccgatgatcctgaacggggtgtgcgtgatctggaagggctggatcgacctgcagcggctcgacggcatggggtgcctggagttcgacgaggagcgcgcgcagcaggaggacgccctggcccagcaggccttcgaggaggcgcggcgccgggcccgcgagttcgaggaccgggaccgcagccaccgggaggagatggagggcgggagcggcgggtccggcgggagcggcggctccgggggcgggggcgtggccgacctgatcaagaagttcgagagcatctccaaggaggagggggacccgcccgtcgccacctgaggactagtccctgttcccagagcccacttttttttctttttttgaaataaaatagcctgtctttcagatctcaaaggctcttttcagagccaccaaaaaaaaaaaaaaaaaaaaaaaaaaaaaaaaaaaaaaaaaaaaaaaaaaaaaaaaaaaaaaaaaaaaaaaaaaaaaaaaaaaaaaaaaaaaaaaaaaaaa

SEQ ID NO: 1567 - RNA, 1823 nt, synthetic construct
  misc_feature 1..1823: note = Artificial____CBFbeta(1-165)_SMMHC(1527-1877) mRNA opt4 mod
  source 1..1823: mol_type = other RNA
aggagagtcccgcagtcggcgtccagcggctctgcttgttcgtgtgtgtgtcgttgcaggccttattcaagcttaccatgcccagagtggtgcccgaccagagaagcaagttcgagaacgaggagttcttcagaaagctgagcagagagtgcgagatcaagtacaccggcttcagagacagaccccacgaggagagacaggccagattccagaacgcctgcagagacggcagaagcgagatcgccttcgtggccaccggcaccaacctgagcctgcagttcttccccgccagctggcagggcgagcagagacagacccccagcagagagtacgtggacctggagagagaggccggcaaggtgtacctgaaggcccccatgatcctgaacggcgtgtgcgtgatctggaagggctggatcgacctgcagagactggacggcatgggctgcctggagttcgacgaggagagagcccagcaggaggacgccctggcccagcaggccttcgaggaggccagaagaagaaccagagagttcgaggacagagacagaagccacagagaggagatggaggtgcacgagctggagaagtccaagagagccctggagacccagatggaggagatgaagacccagctggaggagctggaggacgagctgcaggccaccgaggacgccaagctgagactggaggtgaacatgcaggccctgaagggccagttcgagagagacctgcaggccagagacgagcagaacgaggagaagagaagacagctgcagagacagctgcacgagtacgagaccgagctggaggacgagagaaagcagagagccctggccgccgccgccaagaagaagctggagggcgacctgaaggacctggagctgcaggccgacagcgccatcaagggcagagaggaggccatcaagcagctgagaaagctgcaggcccagatgaaggacttccagagagagctggaggacgccagagccagcagagacgagatcttcgccaccgccaaggagaacgagaagaaggccaagagcctggaggccgacctgatgcagctgcaggaggacctggccgccgccgagagagccagaaagcaggccgacctggagaaggaggagctggccgaggagctggccagcagcctgagcggcagaaacgccctgcaggacgagaagagaagactggaggccagaatcgcccagctggaggaggagctggaggaggagcagggcaacatggaggccatgagcgacagagtgagaaaggccacccagcaggccgagcagctgagcaacgagctggccaccgagagaagcaccgcccagaagaacgagagcgccagacagcagctggagagacagaacaaggagctgagaagcaagctgcacgagatggagggcgccgtgaagtccaagttcaagagcaccatcgccgccctggaggccaagatcgcccagctggaggagcaggtcgagcaggaggccagagagaagcaggccgccaccaagagcctgaagcagaaggacaagaagctgaaggagatcctgctgcaggtcgaggacgagagaaagatggccgagcagtacaaggagcaggccgagaagggcaacgcctgaggactagtccctgttcccagagcccacttttttttctttttttgaaataaaatagcctgtctttcagatctcaaaggctcttttcagagccaccaaaaaaaaaaaaaaaaaaaaaaaaaaaaaaaaaaaaaaaaaaaaaaaaaaaaaaaaaaaaaaaaaaaaaaaaaaaaaaaaaaaaaaaaaaaaaaaaaaaaa

SEQ ID NO: 1568 - RNA, 1823 nt, synthetic construct
  misc_feature 1..1823: note = Artificial____CBFbeta(1-165)_SMMHC(1527-1877) mRNA opt11 mod
  source 1..1823: mol_type = other RNA
aggagagtcccgcagtcggcgtccagcggctctgcttgttcgtgtgtgtgtcgttgcaggccttattcaagcttaccatgccgagggtggtgccagaccaaaggagcaagttcgagaacgaggaatttttcagaaagctgagcagagagtgcgagataaagtacacggggtttagagacagaccacacgaggagaggcaggcaaggttccagaacgcatgcagagacgggagaagcgagatagcattcgtagcgacaggaacaaacctaagcctacaatttttcccggcgagctggcagggagagcagagacagacgccaagcagggagtacgtggacctagagagggaagcaggaaaggtgtacctaaaggcaccaatgatactaaatggggtgtgcgtaatatggaaggggtggatagacctacagagactggacgggatgggatgcttggagttcgacgaagagagagcgcaacaggaggacgcactggcacaacaagcattcgaagaggcaaggaggaggacgagagagttcgaggacagagacaggagtcacagggaggaaatggaggtacacgaactagagaaaagcaagagggcgctggagacacagatggaagagatgaaaacgcaactggaggagctggaagacgagctgcaggcaacagaagatgcgaagctaaggctggaggtgaacatgcaggcactgaaaggacagttcgaaagggacctgcaggcgagggacgaacagaacgaggaaaagaggaggcagctccagaggcagctacacgagtacgagacggagttggaagacgagagaaagcaaagagcactagcggcggcggcgaagaaaaagctagagggagacctcaaagatctggagctacaggcagacagcgcgataaagggcagggaggaagcgataaagcagctaaggaagctgcaggcacagatgaaggacttccagagggagctcgaggacgcaagagcgagccgggacgagatattcgccacggcaaaggagaacgaaaagaaggcgaaaagcctggaggcggacctaatgcaactgcaagaagacctggcagcggcagagcgagcgaggaagcaggcagacctagagaaggaggagctggcggaagaactggcgagtagcctgagcggaaggaacgcactgcaggacgagaagaggaggctagaggcaagaatagcgcagctggaggaggagttggaggaggagcaggggaacatggaggcgatgagcgacagagtgagaaaggcgacacagcaagcagagcagttaagcaacgagctggcaacagagagaagcacggcgcaaaagaacgaatcagcgaggcaacagttggagaggcagaacaaggaactaagaagcaagctgcacgagatggagggcgcggtaaagagcaaattcaagtcaacaatagcggcgcttgaggcaaagatagcacagctggaagaacaagtagaacaggaggcgagagagaaacaagcagcgacaaagagcctgaaacagaaggacaagaagttaaaggagatactgctacaggtagaggacgaaagaaaaatggcggaacagtacaaagagcaggcagaaaaggggaacgcatgaggactagtccctgttcccagagcccacttttttttctttttttgaaataaaatagcctgtctttcagatctcaaaggctcttttcagagccaccaaaaaaaaaaaaaaaaaaaaaaaaaaaaaaaaaaaaaaaaaaaaaaaaaaaaaaaaaaaaaaaaaaaaaaaaaaaaaaaaaaaaaaaaaaaaaaaaaaaaa

SEQ ID NO: 1569 - RNA, 872 nt, synthetic construct
  misc_feature 1..872: note = Artificial____CBFbeta(1-165)_Linker_NFAT5(1-17) mRNA opt1
  source 1..872: mol_type = other RNA
aggagagtcccgcagtcggcgtccagcggctctgcttgttcgtgtgtgtgtcgttgcaggccttattcaagcttaccatgccccgcgtggtcccggaccagcggagcaagttcgagaacgaggagttcttccgcaagctgtcccgggagtgcgagatcaagtacaccggcttccgcgaccggccccacgaggagcgccaggcccggttccagaacgcctgccgcgacgggcggagcgagatcgcgttcgtggccaccggcacgaacctctccctgcagttcttccccgccagctggcagggggagcagcgccagaccccctcccgggagtacgtggacctggagcgcgaggccggcaaggtctacctcaaggccccgatgatcctgaacggggtgtgcgtgatctggaagggctggatcgacctgcagcggctcgacggcatggggtgcctggagttcgacgaggagcgcgcgcagcaggaggacgccctggcccagcaggccttcgaggaggcgcggcgccggacccgcgagttcgaggaccgggaccgcagccaccgggaggagatggagggcgggagcggcgggtccggcgggagcggcggctccgggggcgggatgggcggggcctgcagctccttcaccaccagctccagccccacgatctactgatgatgaggactagtccctgttcccagagcccacttttttttctttttttgaaataaaatagcctgtctttcagatctcaaaggctcttttcagagccaccaaaaaaaaaaaaaaaaaaaaaaaaaaaaaaaaaaaaaaaaaaaaaaaaaaaaaaaaaaaaaaaaaaaaaaaaaaaaaaaaaaaaaaaaaaaaaaaaaaaaa

SEQ ID NO: 1570 - RNA, 872 nt, synthetic construct
  misc_feature 1..872: note = Artificial____NFAT5(1-17)_Linker_CBFbeta(1-165) mRNA opt1
  source 1..872: mol_type = other RNA
aggagagtcccgcagtcggcgtccagcggctctgcttgttcgtgtgtgtgtcgttgcaggccttattcaagcttaccatgggcggggcctgcagctccttcaccaccagctccagccccacgatctacggcgggagcggcgggtccggcgggagcggcggctccgggggcgggatgccccgcgtggtcccggaccagcggagcaagttcgagaacgaggagttcttccgcaagctgtcccgggagtgcgagatcaagtacaccggcttccgcgaccggccccacgaggagcgccaggcccggttccagaacgcctgccgcgacgggcggagcgagatcgcgttcgtggccaccggcacgaacctctccctgcagttcttccccgccagctggcagggggagcagcgccagaccccctcccgggagtacgtggacctggagcgcgaggccggcaaggtctacctcaaggccccgatgatcctgaacggggtgtgcgtgatctggaagggctggatcgacctgcagcggctcgacggcatggggtgcctggagttcgacgaggagcgcgcgcagcaggaggacgccctggcccagcaggccttcgaggaggcgcggcgccggacccgcgagttcgaggaccgggaccgcagccaccgggaggagatggagtgatgatgaggactagtccctgttcccagagcccacttttttttctttttttgaaataaaatagcctgtctttcagatctcaaaggctcttttcagagccaccaaaaaaaaaaaaaaaaaaaaaaaaaaaaaaaaaaaaaaaaaaaaaaaaaaaaaaaaaaaaaaaaaaaaaaaaaaaaaaaaaaaaaaaaaaaaaaaaaaaaa

SEQ ID NO: 1571 - RNA, 827 nt, synthetic construct
  misc_feature 1..827: note = Artificial____CBFbeta(1-165)_NFAT5(1-17) mRNA opt1
  source 1..827: mol_type = other RNA
aggagagtcccgcagtcggcgtccagcggctctgcttgttcgtgtgtgtgtcgttgcaggccttattcaagcttaccatgccccgcgtggtcccggaccagcggagcaagttcgagaacgaggagttcttccgcaagctgtcccgggagtgcgagatcaagtacaccggcttccgcgaccggccccacgaggagcgccaggcccggttccagaacgcctgccgcgacgggcggagcgagatcgcgttcgtggccaccggcacgaacctctccctgcagttcttccccgccagctggcagggggagcagcgccagaccccctcccgggagtacgtggacctggagcgcgaggccggcaaggtctacctcaaggccccgatgatcctgaacggggtgtgcgtgatctggaagggctggatcgacctgcagcggctcgacggcatggggtgcctggagttcgacgaggagcgcgcgcagcaggaggacgccctggcccagcaggccttcgaggaggcgcggcgccggacccgcgagttcgaggaccgggaccgcagccaccgggaggagatggagatgggcggggcctgcagctccttcaccaccagctccagccccacgatctactgatgatgaggactagtccctgttcccagagcccacttttttttctttttttgaaataaaatagcctgtctttcagatctcaaaggctcttttcagagccaccaaaaaaaaaaaaaaaaaaaaaaaaaaaaaaaaaaaaaaaaaaaaaaaaaaaaaaaaaaaaaaaaaaaaaaaaaaaaaaaaaaaaaaaaaaaaaaaaaaaaa

SEQ ID NO: 1572 - RNA, 827 nt, synthetic construct
  misc_feature 1..827: note = Artificial____NFAT5(1-17)_CBFbeta(1-165) mRNA opt1
  source 1..827: mol_type = other RNA
aggagagtcccgcagtcggcgtccagcggctctgcttgttcgtgtgtgtgtcgttgcaggccttattcaagcttaccatgggcggggcctgcagctccttcaccaccagctccagccccacgatctacatgccccgcgtggtcccggaccagcggagcaagttcgagaacgaggagttcttccgcaagctgtcccgggagtgcgagatcaagtacaccggcttccgcgaccggccccacgaggagcgccaggcccggttccagaacgcctgccgcgacgggcggagcgagatcgcgttcgtggccaccggcacgaacctctccctgcagttcttccccgccagctggcagggggagcagcgccagaccccctcccgggagtacgtggacctggagcgcgaggccggcaaggtctacctcaaggccccgatgatcctgaacggggtgtgcgtgatctggaagggctggatcgacctgcagcggctcgacggcatggggtgcctggagttcgacgaggagcgcgcgcagcaggaggacgccctggcccagcaggccttcgaggaggcgcggcgccggacccgcgagttcgaggaccgggaccgcagccaccgggaggagatggagtgatgatgaggactagtccctgttcccagagcccacttttttttctttttttgaaataaaatagcctgtctttcagatctcaaaggctcttttcagagccaccaaaaaaaaaaaaaaaaaaaaaaaaaaaaaaaaaaaaaaaaaaaaaaaaaaaaaaaaaaaaaaaaaaaaaaaaaaaaaaaaaaaaaaaaaaaaaaaaaaaaa

SEQ ID NO: 1573 - RNA, 1757 nt, synthetic construct
  misc_feature 1..1757: note = Artificial____CBFbeta(1-141)_SMMHC(1527-1877) mRNA opt1
  source 1..1757: mol_type = other RNA
aggagagtcccgcagtcggcgtccagcggctctgcttgttcgtgtgtgtgtcgttgcaggccttattcaagcttaccatgccccgcgtggtcccggaccagcggagcaagttcgagaacgaggagttcttccgcaagctgtcccgggagtgcgagatcaagtacaccggcttccgcgaccggccccacgaggagcgccaggcccggttccagaacgcctgccgcgacgggcggagcgagatcgcgttcgtggccaccggcacgaacctctccctgcagttcttccccgccagctggcagggggagcagcgccagaccccctcccgggagtacgtggacctggagcgcgaggccggcaaggtctacctcaaggccccgatgatcctgaacggggtgtgcgtgatctggaagggctggatcgacctgcagcggctcgacggcatggggtgcctggagttcgacgaggagcgcgcgcagcaggaggacgccctggcccagcaggtgcacgagctggagaagtccaagcgcgccctcgagacccagatggaggagatgaagacccagctggaggagctggaggacgagctccaggccacggaggacgcgaagctgcggctggaggtcaacatgcaggccctcaagggccagttcgagcgcgacctgcaggcccgggacgagcagaacgaggagaagcgccggcagctgcagcgccagctccacgagtacgagaccgagctggaggacgagcggaagcagcgcgccctggccgcggccgccaagaagaagctcgagggggacctgaaggacctggagctccaggccgacagcgcgatcaagggccgggaggaggccatcaagcagctgcgcaagctgcaggcccagatgaaggacttccagcgggagctcgaggacgcccgcgccagccgggacgagatcttcgcgaccgccaaggagaacgagaagaaggccaagtccctggaggccgacctgatgcagctccaggaggacctggccgcggccgagcgcgcccggaagcaggccgacctggagaaggaggagctcgccgaggagctggcgagctccctgagcgggcgcaacgccctccaggacgagaagcggcgcctggaggcccggatcgcccagctggaggaggagctcgaggaggagcagggcaacatggaggccatgtccgaccgcgtgcggaaggcgacccagcaggccgagcagctgagcaacgagctggccacggagcgctccaccgcccagaagaacgagagcgcgcgccagcagctcgagcggcagaacaaggagctgcgctccaagctgcacgagatggagggggccgtgaagtccaagttcaagagcaccatcgccgccctcgaggccaagatcgcgcagctggaggagcaggtcgagcaggaggcccgggagaagcaggccgccaccaagagcctgaagcagaaggacaagaagctcaaggagatcctgctccaggtggaggacgagcgcaagatggccgagcagtacaaggagcaggcggagaagggcaacgcctgatgatgaggactagtccctgttcccagagcccacttttttttctttttttgaaataaaatagcctgtctttcagatctcaaaggctcttttcagagccaccaaaaaaaaaaaaaaaaaaaaaaaaaaaaaaaaaaaaaaaaaaaaaaaaaaaaaaaaaaaaaaaaaaaaaaaaaaaaaaaaaaaaaaaaaaaaaaaaaaaaa

SEQ ID NO: 1574 - RNA, 1754 nt, synthetic construct
  misc_feature 1..1754: note Artificial____CBFbeta(1-130)_Linker_Linker_SMMHC(1527-1877) mRNA opt1
  source 1..1754: mol_type = other RNA
aggagagtcccgcagtcggcgtccagcggctctgcttgttcgtgtgtgtgtcgttgcaggccttattcaagcttaccatgccccgcgtggtcccggaccagcggagcaagttcgagaacgaggagttcttccgcaagctgtcccgggagtgcgagatcaagtacaccggcttccgcgaccggccccacgaggagcgccaggcccggttccagaacgcctgccgcgacgggcggagcgagatcgcgttcgtggccaccggcacgaacctctccctgcagttcttccccgccagctggcagggggagcagcgccagaccccctcccgggagtacgtggacctggagcgcgaggccggcaaggtctacctcaaggccccgatgatcctgaacggggtgtgcgtgatctggaagggctggatcgacctgcagcggctcgacggcatggggtgcctggagttcgacgaggagggcggcggcggctccggtggcgggggctccgtgcacgagctggagaagtccaagcgcgccctcgagacccagatggaggagatgaagacccagctggaggagctggaggacgagctccaggccacggaggacgcgaagctgcggctggaggtcaacatgcaggccctcaagggccagttcgagcgcgacctgcaggcccgggacgagcagaacgaggagaagcgccggcagctgcagcgccagctccacgagtacgagaccgagctggaggacgagcggaagcagcgcgccctggccgcggccgccaagaagaagctcgagggggacctgaaggacctggagctccaggccgacagcgcgatcaagggccgggaggaggccatcaagcagctgcgcaagctgcaggcccagatgaaggacttccagcgggagctcgaggacgcccgcgccagccgggacgagatcttcgcgaccgccaaggagaacgagaagaaggccaagtccctggaggccgacctgatgcagctccaggaggacctggccgcggccgagcgcgcccggaagcaggccgacctggagaaggaggagctcgccgaggagctggcgagctccctgagcgggcgcaacgccctccaggacgagaagcggcgcctggaggcccggatcgcccagctggaggaggagctcgaggaggagcagggcaacatggaggccatgtccgaccgcgtgcggaaggcgacccagcaggccgagcagctgagcaacgagctggccacggagcgctccaccgcccagaagaacgagagcgcgcgccagcagctcgagcggcagaacaaggagctgcgctccaagctgcacgagatggagggggccgtgaagtccaagttcaagagcaccatcgccgccctcgaggccaagatcgcgcagctggaggagcaggtcgagcaggaggcccgggagaagcaggccgccaccaagagcctgaagcagaaggacaagaagctcaaggagatcctgctccaggtggaggacgagcgcaagatggccgagcagtacaaggagcaggcggagaagggcaacgcctgatgatgaggactagtccctgttcccagagcccacttttttttctttttttgaaataaaatagcctgtctttcagatctcaaaggctcttttcagagccaccaaaaaaaaaaaaaaaaaaaaaaaaaaaaaaaaaaaaaaaaaaaaaaaaaaaaaaaaaaaaaaaaaaaaaaaaaaaaaaaaaaaaaaaaaaaaaaaaaaaaa

SEQ ID NO: 1575 - RNA, 860 nt, synthetic construct
  misc_feature 1..860: note = Artificial____CBFbeta(1-165)_Linker_Lifeact mRNA opt1
  source 1..860: mol_type = other RNA
aggagagtcccgcagtcggcgtccagcggctctgcttgttcgtgtgtgtgtcgttgcaggccttattcaagcttaccatgccccgcgtggtcccggaccagcggagcaagttcgagaacgaggagttcttccgcaagctgtcccgggagtgcgagatcaagtacaccggcttccgcgaccggccccacgaggagcgccaggcccggttccagaacgcctgccgcgacgggcggagcgagatcgcgttcgtggccaccggcacgaacctctccctgcagttcttccccgccagctggcagggggagcagcgccagaccccctcccgggagtacgtggacctggagcgcgaggccggcaaggtctacctcaaggccccgatgatcctgaacggggtgtgcgtgatctggaagggctggatcgacctgcagcggctcgacggcatggggtgcctggagttcgacgaggagcgcgcgcagcaggaggacgccctggcccagcaggccttcgaggaggcgcggcgccggacccgcgagttcgaggaccgggaccgcagccaccgggaggagatggagggcggcggcggctccggcgtggccgacctgatcaagaagttcgagagcatctccaaggaggagggggacccgcccgtcgccacctgatgatgaggactagtccctgttcccagagcccacttttttttctttttttgaaataaaatagcctgtctttcagatctcaaaggctcttttcagagccaccaaaaaaaaaaaaaaaaaaaaaaaaaaaaaaaaaaaaaaaaaaaaaaaaaaaaaaaaaaaaaaaaaaaaaaaaaaaaaaaaaaaaaaaaaaaaaaaaaaaaa

SEQ ID NO: 1576 - RNA, 890 nt, synthetic construct
  misc_feature 1..890: note = Artificial____CBFbeta(1-165)_Linker_Lifeact mRNA opt1
  source 1..890: mol_type = other RNA
aggagagtcccgcagtcggcgtccagcggctctgcttgttcgtgtgtgtgtcgttgcaggccttattcaagcttaccatgccccgcgtggtcccggaccagcggagcaagttcgagaacgaggagttcttccgcaagctgtcccgggagtgcgagatcaagtacaccggcttccgcgaccggccccacgaggagcgccaggcccggttccagaacgcctgccgcgacgggcggagcgagatcgcgttcgtggccaccggcacgaacctctccctgcagttcttccccgccagctggcagggggagcagcgccagaccccctcccgggagtacgtggacctggagcgcgaggccggcaaggtctacctcaaggccccgatgatcctgaacggggtgtgcgtgatctggaagggctggatcgacctgcagcggctcgacggcatggggtgcctggagttcgacgaggagcgcgcgcagcaggaggacgccctggcccagcaggccttcgaggaggcgcggcgccgggcccgcgagttcgaggaccgggaccgcagccaccgggaggagatggagggcgggagcggcgggtccggcgggagcggcggctccgggggcgggggcgtggccgacctgatcaagaagttcgagagcatctccaaggaggagggggacccgcccgtcgccacctgatgatgaggactagtccctgttcccagagcccacttttttttctttttttgaaataaaatagcctgtctttcagatctcaaaggctcttttcagagccaccaaaaaaaaaaaaaaaaaaaaaaaaaaaaaaaaaaaaaaaaaaaaaaaaaaaaaaaaaaaaaaaaaaaaaaaaaaaaaaaaaaaaaaaaaaaaaaaaaaaaa

SEQ ID NO: 1577 - RNA, 1829 nt, synthetic construct
  misc_feature 1..1829: note = Artificial____CBFbeta(1-165)_SMMHC(1527-1877) mRNA opt4 mod
  source 1..1829: mol_type = other RNA
aggagagtcccgcagtcggcgtccagcggctctgcttgttcgtgtgtgtgtcgttgcaggccttattcaagcttaccatgcccagagtggtgcccgaccagagaagcaagttcgagaacgaggagttcttcagaaagctgagcagagagtgcgagatcaagtacaccggcttcagagacagaccccacgaggagagacaggccagattccagaacgcctgcagagacggcagaagcgagatcgccttcgtggccaccggcaccaacctgagcctgcagttcttccccgccagctggcagggcgagcagagacagacccccagcagagagtacgtggacctggagagagaggccggcaaggtgtacctgaaggcccccatgatcctgaacggcgtgtgcgtgatctggaagggctggatcgacctgcagagactggacggcatgggctgcctggagttcgacgaggagagagcccagcaggaggacgccctggcccagcaggccttcgaggaggccagaagaagaaccagagagttcgaggacagagacagaagccacagagaggagatggaggtgcacgagctggagaagtccaagagagccctggagacccagatggaggagatgaagacccagctggaggagctggaggacgagctgcaggccaccgaggacgccaagctgagactggaggtgaacatgcaggccctgaagggccagttcgagagagacctgcaggccagagacgagcagaacgaggagaagagaagacagctgcagagacagctgcacgagtacgagaccgagctggaggacgagagaaagcagagagccctggccgccgccgccaagaagaagctggagggcgacctgaaggacctggagctgcaggccgacagcgccatcaagggcagagaggaggccatcaagcagctgagaaagctgcaggcccagatgaaggacttccagagagagctggaggacgccagagccagcagagacgagatcttcgccaccgccaaggagaacgagaagaaggccaagagcctggaggccgacctgatgcagctgcaggaggacctggccgccgccgagagagccagaaagcaggccgacctggagaaggaggagctggccgaggagctggccagcagcctgagcggcagaaacgccctgcaggacgagaagagaagactggaggccagaatcgcccagctggaggaggagctggaggaggagcagggcaacatggaggccatgagcgacagagtgagaaaggccacccagcaggccgagcagctgagcaacgagctggccaccgagagaagcaccgcccagaagaacgagagcgccagacagcagctggagagacagaacaaggagctgagaagcaagctgcacgagatggagggcgccgtgaagtccaagttcaagagcaccatcgccgccctggaggccaagatcgcccagctggaggagcaggtcgagcaggaggccagagagaagcaggccgccaccaagagcctgaagcagaaggacaagaagctgaaggagatcctgctgcaggtcgaggacgagagaaagatggccgagcagtacaaggagcaggccgagaagggcaacgcctgatgatgaggactagtccctgttcccagagcccacttttttttctttttttgaaataaaatagcctgtctttcagatctcaaaggctcttttcagagccaccaaaaaaaaaaaaaaaaaaaaaaaaaaaaaaaaaaaaaaaaaaaaaaaaaaaaaaaaaaaaaaaaaaaaaaaaaaaaaaaaaaaaaaaaaaaaaaaaaaaaa

SEQ ID NO: 1578 - RNA, 1829 nt, synthetic construct
  misc_feature 1..1829: note = Artificial____CBFbeta(1-165)_SMMHC(1527-1877) mRNA opt11 mod
  source 1..1829: mol_type = other RNA
aggagagtcccgcagtcggcgtccagcggctctgcttgttcgtgtgtgtgtcgttgcaggccttattcaagcttaccatgccgagggtggtgccagaccaaaggagcaagttcgagaacgaggaatttttcagaaagctgagcagagagtgcgagataaagtacacggggtttagagacagaccacacgaggagaggcaggcaaggttccagaacgcatgcagagacgggagaagcgagatagcattcgtagcgacaggaacaaacctaagcctacaatttttcccggcgagctggcagggagagcagagacagacgccaagcagggagtacgtggacctagagagggaagcaggaaaggtgtacctaaaggcaccaatgatactaaatggggtgtgcgtaatatggaaggggtggatagacctacagagactggacgggatgggatgcttggagttcgacgaagagagagcgcaacaggaggacgcactggcacaacaagcattcgaagaggcaaggaggaggacgagagagttcgaggacagagacaggagtcacagggaggaaatggaggtacacgaactagagaaaagcaagagggcgctggagacacagatggaagagatgaaaacgcaactggaggagctggaagacgagctgcaggcaacagaagatgcgaagctaaggctggaggtgaacatgcaggcactgaaaggacagttcgaaagggacctgcaggcgagggacgaacagaacgaggaaaagaggaggcagctccagaggcagctacacgagtacgagacggagttggaagacgagagaaagcaaagagcactagcggcggcggcgaagaaaaagctagagggagacctcaaagatctggagctacaggcagacagcgcgataaagggcagggaggaagcgataaagcagctaaggaagctgcaggcacagatgaaggacttccagagggagctcgaggacgcaagagcgagccgggacgagatattcgccacggcaaaggagaacgaaaagaaggcgaaaagcctggaggcggacctaatgcaactgcaagaagacctggcagcggcagagcgagcgaggaagcaggcagacctagagaaggaggagctggcggaagaactggcgagtagcctgagcggaaggaacgcactgcaggacgagaagaggaggctagaggcaagaatagcgcagctggaggaggagttggaggaggagcaggggaacatggaggcgatgagcgacagagtgagaaaggcgacacagcaagcagagcagttaagcaacgagctggcaacagagagaagcacggcgcaaaagaacgaatcagcgaggcaacagttggagaggcagaacaaggaactaagaagcaagctgcacgagatggagggcgcggtaaagagcaaattcaagtcaacaatagcggcgcttgaggcaaagatagcacagctggaagaacaagtagaacaggaggcgagagagaaacaagcagcgacaaagagcctgaaacagaaggacaagaagttaaaggagatactgctacaggtagaggacgaaagaaaaatggcggaacagtacaaagagcaggcagaaaaggggaacgcatgatgatgaggactagtccctgttcccagagcccacttttttttctttttttgaaataaaatagcctgtctttcagatctcaaaggctcttttcagagccaccaaaaaaaaaaaaaaaaaaaaaaaaaaaaaaaaaaaaaaaaaaaaaaaaaaaaaaaaaaaaaaaaaaaaaaaaaaaaaaaaaaaaaaaaaaaaaaaaaaaaa

SEQ ID NO: 1579 - RNA, 1823 nt, synthetic construct; identical to SEQ ID NO: 820
  misc_feature 1..1823: note = Artificial____CBFbeta(1-165)_SMMHC(1527-1877) mRNA opt1
  source 1..1823: mol_type = other RNA
  modified_base 1..1823: mod_base = m1f

SEQ ID NO: 1580 - RNA, 1829 nt, synthetic construct; identical to SEQ ID NO: 910
  misc_feature 1..1829: note = Artificial____CBFbeta(1-165)_SMMHC(1527-1877) mRNA opt1
  source 1..1829: mol_type = other RNA
  modified_base 1..1829: mod_base = m1f

SEQ ID NO: 1581 - RNA, 1823 nt, synthetic construct; identical to SEQ ID NO: 820
  misc_feature 1..1823: note = Artificial____CBFbeta(1-165)_SMMHC(1527-1877) mRNA opt1
  source 1..1823: mol_type = other RNA
  modified_base 1..1823: mod_base = p

SEQ ID NO: 1582 - RNA, 1829 nt, synthetic construct; identical to SEQ ID NO: 910
  misc_feature 1..1829: note = Artificial____CBFbeta(1-165)_SMMHC(1527-1877) mRNA opt1
  source 1..1829: mol_type = other RNA
  modified_base 1..1829: mod_base = p
